United States Patent Application Publication US 2024/0000971 A1 - sequence listing, part 3

SEQ ID NO: 3810 - DNA, 2217 bp, Artificial Sequence
  Description of Artificial Sequence: Synthetic polynucleotide
atggctgccgatggttatcttccagattggctcgaggacaacctctctgagggcattcgcgagtggtgggcgctgaaacctggagccccgaagcccaaagccaaccagcaaaagcaggacgacggccggggtctggtgcttcctggctacaagtacctcggacccttcaacggactcgacaagggggagcccgtcaacgcggcggacgcggcggccctcgagcacgacaaggcctacgaccagcagctgcaggcgggtgacaatccgtacctgcggtataaccacgccgacgccgagtttcaggagcgtctgcaagaagatacgtcttttgggggcaacctcgggcgagcagtcttccaggccaagaagcgggttctcgaacctctcggtctggttgaggaaggcgctaagacggctcctggaaagaagagaccggtagagccatcaccccagcgttctccagactcctctacgggcatcggcaagaagggccaacagcccgccagaaaaagactcaattttggtcagactggcgactcagagtcagttccagaccctcaacctctcggagaacctccagcagcgccctctggtgtgggacctaatacaatggctgcaggcggtggcgcaccaatggcagacaataacgaaggcgccgacggagtgggtagttcctcgggaaattggcattgcgattccacatggctgggcgacagagtcatcaccaccagcacccgaacctgggccctgcccacctacaacaaccacctctacaagcaaatctccaacgggacatcgggaggagccaccaacgacaacacctacttcggctacagcaccccctgggggtattttgactttaacagattccactgccacttttcaccacgtgactggcagcgactcatcaacaacaactggggattccggcccaagagactcagcttcaagctcttcaacatccaggtcaaggaggtcacgcagaatgaaggcaccaagaccatcgccaataacctcaccagcaccatccaggtgtttacggactcggagtaccagctgccgtacgttctcggctctgcccaccagggctgcctgcctccgttcccggcggacgtgttcacgattccccagtacggctacctaacactcaacaacggtagtcaggccgtgggacgctcctccttctactgcctggaatactttccttcgcagatgctgagaaccggcaacaacttccagtttacttacaccttcgaggacgtgcctttccacagcagctacgcccacagccagagcttggaccggctgatgaatcctctgattgaccagtacctgtactacttgtctcggattcaaacagcaggaggcacggcaaatacgcagactctgggcttcagccaaggtgggcctaatacaatggccaatcaggcaaagaactggctgccaggaccctgttaccgccaacaacgcgtctcaacgacaaccgggcaaaacaacaatagcaactttgcctggactgctgggaccaaataccatctgaatggaagaaattcattggctaatcctggcatcgctatggcaacacacaaagacgacgaggagcgtttttttcccagtaacgggatcctgatttttggcaaacaaaatgctgccagagacaatgcggattacagcgatgtcatgcccaccagcgaggaagaaatcaaaaccactaaccctgtggccacagaggaatacggtatcgtggcagataacttgcagcagcaaaacacggctcctcaaattggaactgtcaacagccagggggccttacccggtatggtctggcagaaccgggacgtgtacctgcagggtcccatctgggccaagattcctcacacggacggcaacttccacccgtctccgctgatgggcggctttggcctgaaacatcctccgcctcagatcctgatcaagaacacgcctgtacctgcggatcctccgaccaccttcaaccagtcaaagctgaactctttcatcacgcaatacagcaccggacaggtcagcgtggaaattgaatgggagctgcagaaggaaaacagcaagcgctggaaccccgagatccagtacacctccaactactacaaatctacaagtgtggactttgctgttaatacagaaggcgtgtactctgaaccccgccccattggcacccgttacctcacccgtaatctgtaa

SEQ ID NO: 3811 - DNA, 2217 bp, Artificial Sequence
  Description of Artificial Sequence: Synthetic polynucleotide
atggctgccgatggttatcttccagattggctcgaggacaacctctctgagggcattcgcgagtggtgggcgctgaaacctggagccccgaagcccaaagccaaccagcaaaagcaggacgacggccggggtctggtgcttcctggctacaagtacctcggacccttcaacggactcgacaagggggagcccgtcaacgcggcggacgcggcggccctcgagcacgacaaggcctacgaccagcagctgcaggcgggtgacaatccgtacctgcggtataaccacgccgacgccgagtttcaggagcgtctgcaagaagatacgtcttttgggggcaacctcgggcgagcagtcttccaggccaagaagcgggttctcgaacctctcggtctggttgaggaaggcgctaagacggctcctggaaagaagagaccggtagagccatcaccccagcgttctccagactcctctacgggcatcggcaagaagggccaacagcccgccagaaaaagactcaattttggtcagactggcgactcagagtcagttccagaccctcaacctctcggagaacctccagcagcgccctctggtgtgggacctaatacaatggctgcaggcggtggcgcaccaatggcagacaataacgaaggcgccgacggagtgggtagttcctcgggaaattggcattgcgattccacatggctgggcgacagagtcatcaccaccagcacccgaacctgggccctgcccacctacaacaaccacctctacaagcaaatctccaacgggacatcgggaggagccaccaacgacaacacctacttcggctacagcaccccctgggggtattttgactttaacagattccactgccacttttcaccacgtgactggcagcgactcatcaacaacaactggggattccggcccaagagactcagcttcaagctcttcaacatccaggtcaaggaggtcacgcagaatgaaggcaccaagaccatcgccaataacctcaccagcaccatccaggtgtttacggactcggagtaccagctgccgtacgttctcggctctgcccaccagggctgcctgcctccgttcccggcggacgtgttcacgattccccagtacggctacctaacactcaacaacggtagtcaggccgtgggacgctcctccttctactgcctggaatactttccttcgcagatgctgagaaccggcaacaacttccagtttacttacaccttcgaggacgtgcctttccacagcagctacgcccacagccagaacttggaccggctgatgaatcctctgattgaccagtacctgtactacttgtctcggattcaaacaacaggaggcacggcaaatacgcagactctgggcttcagccaaggtgggcctaatacaatggccaatcaggcaaagaactggctgccaggaccctgttaccgccaacaacgcgtctcaacgacaaccgggcaaaacaacaatagcaactttgcctggactgctgggaccaaataccatctgaatggaagaaattcattggctaatcctggcatcgctatggcaacacacaaagacgacgaggagcgtttttttcccagtaacgggatcctgatttttggcaaacaaaatgctgccagagacaatgcggattacagcgatgtcatgcccaccagcgaggaagaaatcaaaaccactaaccctgtggccacagaggaatacggtatcgtggcagataacttgcagcagcaaaacacggctcctcaaattggaactgtcaacagccagggggccttacccggtatggtctggcagaaccgggacgtgtacctgcagggtcccatctgggccaagattcctcacacggacggcaacttccacccgtctccgctgatgggcggctttggcctgaaacatcctccgcctcagatcctgatcaagaacacgcctgtacctgcggatcctccgaccaccttcaaccagtcaaagctgaactctttcatcacgcaatacagcaccggacaggtcagcgtggaaattgaatgggagctgcagaaggaaaacagcaagcgctggaaccccgagatccagtacacctccaactactacaaatctacaagtgtggactttgctgttaatacagaaggcgtgtactctgaaccccgccccattggcacccgttacctcacccgtaatctgtaa

SEQ ID NO: 3812 - DNA, 2217 bp, Artificial Sequence
  Description of Artificial Sequence: Synthetic polynucleotide
atggctgccgatggttatcttccagattggctcgaggacaacctctctgagggcattcgcgagtggtgggcgctgaaacctggagccccgaagcccaaagccaaccagcaaaagcaggacgacggccggggtctggtgcttcctggctacaagtacctcggacccttcaacggactcgacaagggggagcccgtcaacgcggcggacgcggcggccctcgagcacgacaaggcctacgaccagcagctgcaggcgggtgacaatccgtacctgcggtataaccacgccgacgccgagtttcaggagcgtctgcaagaagatacgtcttttgggggcaacctcgggcgagcagtcttccaggccaagaagcgggttctcgaacctctcggtctggttgaggaaggcgctaagacggctcctggaaagaagagaccggtagagccatcaccccagcgttctccagactcctctacgggcatcggcaagaagggccaacagcccgccagaaaaagactcaattttggtcagactggcgactcagagtcagttccagaccctcaacctctcggagaacctccagcagcgccctctggtgtgggacctaatacaatggctgcaggcggtggcgcaccaatggcagacaataacgaaggcgccgacggagtgggtagttcctcgggaaattggcattgcgattccacatggctgggcgacagagtcatcaccaccagcacccgaacctgggccctgcccacctacaacaaccacctctacaagcaaatctccaacgggacatcgggaggagccaccaacgacaacacctacttcggctacagcaccccctgggggtattttgactttaacagattccactgccacttttcaccacgtgactggcagcgactcatcaacaacaactggggattccggcccaagagactcagcttcaagctcttcaacatccaggtcaaggcggtcacgcagaatgaaggcaccaagaccatcgccaataacctcaccagcaccatccaggtgtttacggactcggagtaccagctgccgtacgttctcggctctgcccaccagggctgcctgcctccgttcccggcggacgtgttcacgattccccagtacggctacctaacactcaacaacggtagtcaggccgtgggacgctcctccttctactgcctggaatactttccttcgcagatgctgagaaccggcaacaacttccagtttacttacaccttcgaggacgtgcctttccacagcagctacgcccacagccagagcttggaccggctgatgaatcctctgattgaccagtacctgtactacttgtctcggattcaaacaacaggaggcacggcaaatacgcagactctgggcttcagccaaggtgggcctaatacaatggccaatcaggcaaagaactggctgccaggaccctgttaccgccaacaacgcgtctcaacgacaaccgggcaaaacaacaatagcaactttgcctggactgctgggaccaaataccatctgaatggaagaaattcattggctaatcctagcatcgctatggcaacacacaaagacgacgaggagcgtttttttcccagtaacgggatcctgatttttggcaaacaaaatgctgccagagacaatgcggattacagcgatgtcatgcccaccagcgaggaagaaatcaaaaccactaaccctgtggccacagaggaatacggtatcgtggcagataacttgcagcagcaaaacacggctcctcaaattggaactgtcaacagccagggggccttacccggtatggtctggcagaaccgggacgtgtacctgcagggtcccatctgggccaagattcctcacacggacggcaacttccacccgtctccgctgatgggcggctttggcctgaaacatcctccgcctcagatcctgatcaagaacacgcctgtacctgcggatcctccgaccaccttcaaccagtcaaagctgaactctttcatcacgcaatacagcaccggacaggtcagcgtggaaattgaatgggagctgcagaaggaaaacagcaagcgctggaaccccgagatccagtacacctccaactactacaaatctacaagtgtggactttgctgttaatacagaaggcgtgtactctgaaccccgccccattggcacccgttacctcacccgtaatctgtaa

SEQ ID NO: 3813 - DNA, 2217 bp, Artificial Sequence
  Description of Artificial Sequence: Synthetic polynucleotide
atggctgccgatggttatcttccagattggctcgaggacaacctctctgagggcattcgcgagtggtgggcgctgaaacctggagccccgaagcccaaagccaaccagcaaaagcaggacgacggccggggtctggtgcttcctggctacaagtacctcggacccttcaacggactcgacaagggggagcccgtcaacgcggcggacgcggcggccctcgagcacgacaaggcctacgaccagcagctgcaggcgggtgacaatccgtacctgcggtataaccacgccgacgccgagtttcaggagcgtctgcaagaagatacgtcttttgggggcaacctcgggcgagcagtcttccaggccaagaagcgggttctcgaacctctcggtctggttgaggaaggcgctaagacggctcctggaaagaagagaccggtagagccatcaccccagcgttctccagactcctctacgggcatcggcaagaagggccaacagcccgccagaaaaagactcaattttggtcagactggcgactcagagtcagttccagaccctcaacctctcggagaacctccagcagcgccctctggtgtgggacctaatacaatggctgcaggcggtggcgcaccaatggcagacaataacgaaggcgccgacggagtgggtagttcctcgggaaattggcattgcgattccacatggctgggcgacagagtcatcaccaccagcacccgaacctgggccctgcccacctacaacaaccacctctacaagcaaatctccaacgggacatcgggaggagccaccaacgacaacacctacttcggctacagcaccccctgggggtattttgactttaacagattccactgccacttttcaccacgtgactggcagcgactcatcaacaacaactggggattccggcccaagagactcagcttcaagctcttcaacatccaggtcaaggaggtcacgcagaatgaaggcaccaagaccatcgccaataacctcaccagcaccatccaggtgtttacggactcggagtaccagctgccgtacgttctcggctctgcccaccagggctgcctgcctccgttcccggcggacgtgttcacgattccccagtacggctacctaacactcaacaacggtagtcaggccgtgggacgctcctccttctactgcctggaatactttccttcgcagatgctgagaaccggcaacaacttccagtttacttacaccttcgaggacgtgcctttccacagcagctacgcccacagccagagcttggaccggctgatgaatcctctgattgaccagtacctgtactacttgtctcggattcaaacaacaggaggcacggcaaatacgcagactctgggcttcagccaaggtgggcctaatacaatggccaatcaggcaaagaactggctgccaggaccctgttaccgccaacaacgcgtctcaacgacaaccgggcaaaacaacaatagcaactttgcctggactgctgggaccaaataccatctgaatggaagaaattcattggctaatcctggcatcgctatggcaacacacaaagacgacgaggagcgtttttttcccagtaacgggatcctgatttttggcaaacaaaatgctgccagagacaatgcggattacagcgatgtcatgcccaccagcgaggaagaaatcaaaaccactaaccctgtggccacagaggaatacgatatcgtggcagataacttgcagcagcaaaacacggctcctcaaattggaactgtcaacagccagggggccttacccggtatggtctggcagaaccgggacgtgtacctgcagggtcccatctgggccaagattcctcacacggacggcaacttccacccgtctccgctgatgggcggctttggcctgaaacatcctccgcctcagatcctgatcaagaacacgcctgtacctgcggatcctccgaccaccttcaaccagtcaaagctgaactctttcatcacgcaatacagcaccggacaggtcagcgtggaaattgaatgggagctgcagaaggaaaacagcaagcgctggaaccccgagatccagtacacctccaactactacaaatctacaagtgtggactttgctgttaatacagaaggcgtgtactctgaaccccgccccattggcacccgttacctcacccgtaatctgtaa

SEQ ID NO: 3814 - DNA, 2217 bp, Artificial Sequence
  Description of Artificial Sequence: Synthetic polynucleotide
atggctgccgatggttatcttccagattggctcgaggacaacctctctgagggcattcgcgagtggtgggcgctgaaacctggagccccgaagcccaaagccaaccagcaaaagcaggacgacggccggggtctggtgcttcctggctacaagtacctcggacccttcaacggactcgacaagggggagcccgtcaacgcggcggacgcggcggccctcgagcacgacaaggcctacgaccagcagctgcaggcgggtgacaatccgtacctgcggtataaccacgccgacgccgagtttcaggagcgtctgcaagaagatacgtcttttgggggcaacctcgggcgagcagtcttccaggccaagaagcgggttctcgaacctctcggtctggttgaggaaggcgctaagacggctcctggaaagaagagaccggtagagccatcaccccagcgttctccagactcctctacgggcatcggcaagaagggccaacagcccgccagaaaaagactcaattttggtcagactggcgactcagagtcagttccagaccctcaacctctcggagaacctccagcagcgccctctggtgtgggacctaatacaatggctgcaggcggtggcgcaccaatggcagacaataacgaaggcgccgacggagtgggtagttcctcgggaaattggcattgcgattccacatggctgggcgacagagtcatcaccaccagcacccgaacctgggccctgcccacctacaacaaccacctctacaagcaaatctccaacgggacatcgggaggagccaccaacgacaacacctacttcggctacagcaccccctgggggtattttgactttaacagattccactgccacttttcaccacgtgactggcagcgactcatcaacaacaactggggattccggcccaagagactcagcttcaagctcttcaacatccaggtcaaggaggtcacgcagaatgaaggcaccaagaccatcgccaataacctcaccagcaccatccaggtgtttacggactcggagtaccagctgccgtacgttctcggctctgcccaccagggctgcctgcctccgttcccggcggacgtgttcacgattccccagtacggctacctaacactcaacaacggtagtcaggccgtgggacgctcctccttctactgcctggaatactttccttcgcagatgctgagaaccggcaacaacttccagtttacttacaccttcgaggacgtgcctttccacagcagctacgcccacagccagagcttggaccggctgatgaatcctctgattgaccagtacctgtactacttgtctcggattcaaacaacaggaggcacggcaaatacgcagactccgggcttcagccaaggtgggcctaatacaatggccaatcaggcaaagaactggctgccaggaccctgttaccgccaacaacgcgtctcaacgacaaccgggcaaaacaacaatagcaactttgcctggactgctgggaccaaataccatctgaatggaagaaattcattggctaatcctggcatcgctatggcaacacacaaagacgacgaggagcgtttttttcccagtaacgggatcctgatttttggcaaacaaaatgctgccagagacaatgcggattacagcgatgtcatgcccaccagcgaggaagaaatcaaaaccactaaccctgtggccacagaggaatacggtatcgtggcagataacttgcagcagcaaaacacggctcctcaaattggaactgtcaacagccagggggccttacccggtatggtctggcagaaccgggacgtgtacctgcagggtcccatctgggccaagattcctcacacggacggcaacttccacccgtctccgctgatgggcggctttggcctgaaacatcctccgcctcagatcctgatcaagaacacgcctgtacctgcggatcctccgaccaccttcaaccagtcaaagctgaactctttcatcacgcaatacagcaccggacaggtcagcgtggaaattgaatgggagctgcagaaggaaaacagcaagcgctggaaccccgagatccagtacacctccaactactacaaatctacaagtgtggactttgctgttaatacagaaggcgtgtactctgaaccccgccccattggcacccgttacctcacccgtaatctgtaa

SEQ ID NO: 3815 - DNA, 2217 bp, Artificial Sequence
  Description of Artificial Sequence: Synthetic polynucleotide
atggctgccgatggttatcttccagattggctcgaggacaacctctctgagggcattcgcgagtggtgggcgctgaaacctggagccccgaagcccaaagccaaccagcaaaagcaggacgacggccggggtctggtgcttcctggctacaagtacctcggacccttcaacggactcgacaagggggagcccgtcaacgcggcggacgcggcggccctcgagcacgacaaggcctacgaccagcagctgcaggcgggtgacaatccgtacctgcggtataaccacgccgacgccgagtttcaggagcgtctgcaagaagatacgtcttttgggggcaacctcgggcgagcagtcttccaggccaagaagcgggttctcgaacctctcggtctggttgaggaaggcgctaagacggctcctggaaagaagagaccggtagagccatcaccccagcgttctccagactcctctacgggcatcggcaagaagggccaacagcccgccagaaaaagactcaattttggtcagactggcgactcagagtcagttccagaccctcaacctctcggagaacctccagcagcgccctctggtgtgggacctaatacaatggctgcaggcggtggcgcaccaatggcagacaataacgaaggcgccgacggagtgggtagttcctcgggaaattggcattgcgattccacatggctgggcgacagagtcatcaccaccagcacccgaacctgggccctgcccacctacaacaaccacctctacaagcaaatctccaacgggacatcgggaggagccaccaacgacaacacctacttcggctacagcaccccctgggggtattttgactttaacagattccactgccacttttcaccacgtgactggcagcgactcatcaacaacaactggggattccggcccaagagactcagcttcaagctcttcaacatccaggtcaaggaggtcacgcagaatgaaggcaccaagaccatcgccaataacctcaccagcaccatccaggtgtttacggactcggagtaccagctgccgtacgttctcggctctgcccaccagggctgcctgcctccgttcccggcggacgtgttcacgattccccagtacggctacctaacactcaacaacggtagtcaggccgtgggacgctcctcctcctactgcctggaatactttccttcgcagatgctgagaaccggcaacaacttccagtttacttacaccttcgaggacgtgcctttccacagcagctacgcccacagccagagcttggaccggctgatgaatcctctgattgaccagtacctgtactacttgtctcggattcaaacaacaggaggcacggcaaatacgcagactctgggcttcagccaaggtgggcctaatacaatggccaatcaggcaaagaactggctgccaggaccctgttaccgccaacaacgcgtctcaacgacaaccgggcaaaacaacaatagcaactttgcctggactgctgggaccaaataccatctgaatggaagaaattcattggctaatcctggcatcgctatggcaacacacaaagacgacgaggagcgtttttttcccagtaacgggatcctgatttttggcaaacaaaatgctgccagagacaatgcggattacagcgatgtcatgcccaccagcgaggaagaaatcaaaaccactaaccctgtggccacagaggaatacggtatcgtggcagataacttgcagcagcaaaacacggctcctcaaattggaactgtcaacagccagggggccttacccggtatggtctggcagaaccgggacgtgtacctgcagggtcccatctgggccaagattcctcacacggacggcaacttccacccgtctccgctgatgggcggctttggcctgaaacatcctccgcctcagatcctgatcaagaacacgcctgtacctgcggatcctccgaccaccttcaaccagtcaaagctgaactctttcatcacgcaatacagcaccggacaggtcagcgtggaaattgaatgggagctgcagaaggaaaacagcaagcgctggaaccccgagatccagtacacctccaactactacaaatctacaagtgtggactttgctgttaatacagaaggcgtgtactctgaaccccgccccattggcacccgttacctcacccgtaatctgtaa

SEQ ID NO: 3816 - DNA, 2217 bp, Artificial Sequence
  Description of Artificial Sequence: Synthetic polynucleotide
atggctgccgatggttatcttccagattggctcgaggacaacctctctgagggcattcgcgagtggtgggcgctgaaacctggagccccgaagcccaaagccaaccagcaaaagcaggacgacggccggggtctggtgcttcctggctacaagtacctcggacccttcaacggactcgacaagggggagcccgtcaacgcggcggacgcggcggccctcgagcacgacaaggcctacgaccagcagctgcaggcgggtgacaatccgtacctgcggtataaccacgccgacgccgagtttcaggagcgtctgcaagaagatacgtcttttgggggcaacctcgggcgagcagccttccaggccaagaagcgggttctcgaacctctcggtctggttgaggaaggcgctaagacggctcctggaaagaagagaccggtagagccatcaccccagcgttctccagactcctctacgggcatcggcaagaagggccaacagcccgccagaaaaagactcaattttggtcagactggcgactcagagtcagttccagaccctcaacctctcggagaacctccagcagcgccctctggtgtgggacctaatacaatggctgcaggcggtggcgcaccaatggcagacaataacgaaggcgccgacggagtgggtagttcctcgggaaattggcattgcgattccacatggctgggcgacagagtcatcaccaccagcacccgaacctgggccctgcccacctacaacaaccacctctacaagcaaatctccaacgggacatcgggaggagccaccaacgacaacacctacttcggctacagcaccccctgggggtattttgactttaacagattccactgccacttttcaccacgtgactggcagcgactcatcaacaacaactggggattccggcccaagagactcagcttcaagctcttcaacatccaggtcaaggaggtcacgcagaatgaaggcaccaagaccatcgccaataacctcaccagcaccatccaggtgtttacggactcggagtaccagctgccgtacgttctcggctctgcccaccagggctgcctgcctccgttcccggcggacgtgttcacgattccccagtacggctacctaacactcaacaacggtagtcaggccgtgggacgctcctccttctactgcctggaatactttccttcgcagatgctgagaaccggcaacaacttccagtttacttacaccttcgaggacgtgcctttccacagcagctacgcccacagccagagcttggaccggctgatgaatcctctgattgaccagtacctgtactacttgtctcggattcaaacaacaggaggcacggcaaatacgcagactctgggcttcagccaaggtgggcctaatacaatggccaatcaggcaaagaactggctgccaggaccctgttaccgccaacaacgcgtctcaacgacaaccgggcaaaacaacaatagcaactttgcctggactgctgggaccaaataccatctgaatggaagaaattcattggctaatcctggcatcgctatggcaacacacaaagacgacgaggagcgtttttttcccagtaacgggatcctgatttttggcaaacaaaatgctgccagagacaatgcggattacagcgatgtcatgcccaccagcgaggaagaaatcaaaaccactaaccctgtggccacagaggaatacggtatcgtggcagataacttgcagcagcaaaacacggctcctcaaattggaactgtcaacagccagggggccttacccggtatggtctggcagaaccgggacgtgtacctgcagggtcccatctgggccaagattcctcacacggacggcaacttccacccgtctccgctgatgggcggctttggcctgaaacatcctccgcctcagatcctgatcaagaacacgcctgtacctgcggatcctccgaccaccttcaaccagtcaaagctgaactctttcatcacgcaatacagcaccggacaggtcagcgtggaaattgaatgggagctgcagaaggaaaacagcaagcgctggaaccccgagatccagtacacctccaactactacaaatctacaagtgtggactttgctgttaatacagaaggcgtgtactctgaaccccgccccattggcacccgttacctcacccgtaatctgtaa

SEQ ID NO: 3817 - DNA, 2217 bp, Artificial Sequence
  Description of Artificial Sequence: Synthetic polynucleotide
atggctgccgatggttatcttccagattggctcgaggacaacctctctgagggcattcgcgagtggtgggcgctgaaacctggagccccgaagcccaaagccaaccagcaaaagcaggacgacggccggggtctggtgcttcctggctacaagtacctcggacccttcaacggactcgacaagggggagcccgtcaacgcggcggacgcggcggccctcgagcacgacaaggcctacgaccagcagctgcaggcgggtgacaatccgtacctgcggtataaccacgccgacgccgagtttcaggagcgtctgcaagaagatacgtcttttgggggcaacctcgggcgagcagtcttccaggccaagaagcgggttctcgaacctctcggtctggttgaggaaggcgctaagacggctcctggaaagaagagaccggtagagccatcaccccagcgttctccagactcctctacgggcatcggcaagaagggccaacagcccgccagaaaaagactcaattttggtcagactggcgactcagagtcagttccagaccctcaacctctcggagaacctccagcagcgccctctggtgtgggacctaatacaatggctgcaggcggtggcgcaccaatggcagacaataacgaaggcgccgacggagtgggtagttcctcgggaaattggcattgcgattccacatggctgggcgacagagtcatcaccaccagcacccgaacctgggccctgcccacctacaacaaccacctctacaagcaaatctccaacgggacatcgggaggagccaccgacgacaacacctacttcggctacagcaccccctgggggtattttgactttaacagattccactgccacttttcaccacgtgactggcagcgactcatcaacaacaactggggattccggcccaagagactcagcttcaagctcttcaacatccaggtcaaggaggtcacgcagaatgaaggcaccaagaccatcgccaataacctcaccagcaccatccaggtgtttacggactcggagtaccagctgccgtacgttctcggctctgcccaccagggctgcctgcctccgttcccggcggacgtgttcacgattccccagtacggctacctaacactcaacaacggtagtcaggccgtgggacgctcctccttctactgcctggaatactttccttcgcagatgctgagaaccggcaacaacttccagtttacttacaccttcgaggacgtgcctttccacagcagctacgcccacagccagagcttggaccggctgatgaatcctctgattgaccagtacctgtactacttgtctcggattcaaacaacaggaggcacggcaaatacgcagactctgggcttcagccaaggtgggcctaatacaatggccaatcaggcaaagaactggctgccaggaccctgttaccgccaacaacgcgtctcaacgacaaccgggcaaaacaacaatagcaactttgcctggactgctgggaccaaataccatctgaatggaagaaattcattggctaatcctggcatcgctatggcaacacacaaagacgacgaggagcgtttttttcccagtaacgggatcctgatttttggcaaacaaaatgctgccagagacaatgcggattacagcgatgtcatgcccaccagcgaggaagaaatcaaaaccactaaccctgtggccacagaggaatacggtatcgtggcagataacttgcagcagcaaaacacggctcctcaaattggaactgtcaacagccagggggccttacccggtatggtctggcagaaccgggacgtgtacctgcagggtcccatctgggccaagattcctcacacggacggcaacttccacccgtctccgctgatgggcggctttggcctgaaacatcctccgcctcagatcctgatcaagaacacgcctgtacctgcggatcctccgaccaccttcaaccagtcaaagctgaactctttcatcacgcaatacagcaccggacaggtcagcgtggaaattgaatgggagctgcagaaggaaaacagcaagcgctggaaccccgagatccagtacacctccaactactacaaatctacaagtgtggactttgctgttaatacagaaggcgtgtactctgaaccccgccccattggcacccgttacctcacccgtaatctgtaa

SEQ ID NO: 3818 - DNA, 2217 bp, Artificial Sequence
  Description of Artificial Sequence: Synthetic polynucleotide
atggctgccgatggttatcttccagattggctcgaggacaacctctctgagggcattcgcgagtggtgggcgctgaaacctggagccccgaagcccaaagccaaccagcaaaagcaggacgacggccggggtctggtgcttcctggctacaagtacctcggacccttcaacggactcgacaagggggagcccgtcaacgcggcggacgcggcggccctcgagcacgacaaggcctacgaccagcagctgcaggcgggtgacaatccgtacctgcggtataaccacgccgacgccgagtttcaggagcgtctgcaagaagatacgtcttttgggggcaacctcgggcgagcagtcttccaggccaagaagcgggttctcgaacctctcggtctggttgaggaaggcgctaagacggctcctggaaagaagagaccggtagagccatcaccccagcgttctccagactcctctacgggcatcggcaagaagggccaacagcccgccagaaaaagactcaattttggtcagactggcgactcagagtcagttccagaccctcaacctctcggagaacctccagcagcgccctctggtgtgggacctaatacaatggctgcaggcggtggcgcaccaatggcagacaataacgaaggcgccgacggagtgggtagttcctcgggaaattggcattgcgattccacatggctgggcgacagagtcatcaccaccagcacccgaacctgggccctgcccacctacaacaaccacctctacaagcaaatctccaacgggacatcgggaggagccaccaacgacaacacctacttcggctacagcaccccctgggggtattttgactttaacagattccactgccacttttcaccacgtgactggcagcgactcatcaacaacaactggggattccggcccaagagactcagcttcaagctcttcaacatccaggtcaaggaggtcacgcagaatgaaggcaccaagaccatcgccaataacctcaccagcaccatccaggtgtttacggactcggagtaccagctgccgtacgttctcggctctgcccaccagggctgcctgcctccgttcccggcggacgtgttcacgattccccagtacggctacctaacactcaacaacggtagtcaggccgtgggacgctcctccttctactgcctggaatactttccttcgcagatgctgagaaccggcaacaacttccagtttacttacaccttcgaggacgtgcctttccacagcagctacgcccacagccagagcttggaccggctgatgaatcctctgattgaccagtacctgtactacttgtctcggattcaaacaacaggaggcacggcaaatacgcagactctgggcttcagccaaggtgggcctaatacaatggccaatcaggcaaagaactggctgccaggaccctgttaccgccaacaacgcgtctcaacgacaaccgggcaaaacaacaatagcaactttgcctggactgctgggaccaaataccatctgaatggaagaaattcattggctaatcctggcatcgctatggcaacacacaaagacgacgaggagcgtttttttcccagtaacgggatcctgatttttggcaaacaaaatgctaccagagacaatgcggattacagcgatgtcatgcccaccagcgaggaagaaatcaaaaccactaaccctgtggccacagaggaatacggtatcgtggcagataacttgcagcagcaaaacacggctcctcaaattggaactgtcaacagccagggggccttacccggtatggtctggcagaaccgggacgtgtacctgcagggtcccatctgggccaagattcctcacacggacggcaacttccacccgtctccgctgatgggcggctttggcctgaaacatcctccgcctcagatcctgatcaagaacacgcctgtacctgcggatcctccgaccaccttcaaccagtcaaagctgaactctttcatcacgcaatacagcaccggacaggtcagcgtggaaattgaatgggagctgcagaaggaaaacagcaagcgctggaaccccgagatccagtacacctccaactactacaaatctacaagtgtggactttgctgttaatacagaaggcgtgtactctgaaccccgccccattggcacccgttacctcacccgtaatctgtaa

SEQ ID NO: 3819 - DNA, 2217 bp, Artificial Sequence
  Description of Artificial Sequence: Synthetic polynucleotide
atggctgccgatggttatcttccagattggctcgaggacaacctctctgagggcattcgcgagtggtgggcgctgaaacctggagccccgaagcccaaagccaaccagcaaaagcaggacgacggccggggtctggtgcttcctggctacaagtacctcggacccttcaacggactcgacaagggggagcccgtcaacgcggcggacgcggcggccctcgagcacgacaaggcctacgaccagcagctgcaggcgggtgacaatccgtacctgcggtataaccacgccgacgccgagtttcaggagcgtctgcaagaagatacgtcttttgggggcaacctcgggcgagcagtcttccaggccaagaagcgggttctcgaacctctcggtctggttgaggaaggcgctaagacggctcctggaaagaagagaccggtagagccatcaccccagcgttctccagactcctctacgggcatcggcaagaagggccaacagcccgccagaaaaagactcaattttggtcagactggcgactcagagtcagttccagaccctcaacctctcggagaacctccagcagcgccctctggtgtgggacctaatacaatggctgcaggcggtggcgcaccaatggcagacaataacgaaggcgccgacggagtgggtagttcctcgggaaattggcattgcgattccacatggctgggcgacagagtcatcaccaccagcacccgaacctgggccctgcccacctacaacaaccacctctacaagcaaatctccaacgggacatcgggaggagccaccaacgacaacacctacttcggctacagcaccccctgggggtattttgactttaacagattccactgccacttttcaccacgtgactggcagcgactcatcaacaacaactggggattccggcccaagagactcagcttcaagctcttcaacatccaggtcaaggaggtcacgcagaatgaaggcaccaagaccatcgccaataacctcaccagcaccatccaggtgtttacggactcggagtaccagctgccgtacgttctcggctctgcccaccagggctgcctgcctccgttcccggcggacgtgttcacgattccccagtacggctacctaacactcaacaacggtagtcaggccgtgggacgctcctccttctactgcctggaatactttccttcgcagatgctgagaaccggcaacaacttccagtttacttacaccttcgaggacgtgcctttccacagcagctacgcccacagccagagcttggaccggctgatgaatcctctgattgaccagtacctgtactacttgtctcggattcaaacaacaggaggcacggcaaatacgcagactctgggcttcagccaaggtgggcctaatacaatggccaatcaggcaaagaactggctgccaggaccctgttaccgccaacaacgcgtctcaacgacaaccgggcaaaacaacaatagcaactttgcctggactgctgggaccaaataccatctgaatggaagaaattcattggctaatcctggcatcgctatggcaacacacaaagacgacgaggagcgtttttttcccagtaacgggatcctgatttttggcaaacaaaatgctgccagagacaatgcggattacagcgatgtcatgcccaccagcgaggaagaaatcaaaaccactaaccctgtggccacagaggaacacggtatcgtggcagataacttgcagcagcaaaacacggctcctcaaattggaactgtcaacagccagggggccttacccggtatggtctggcagaaccgggacgtgtacctgcagggtcccatctgggccaagattcctcacacggacggcaacttccacccgtctccgctgatgggcggctttggcctgaaacatcctccgcctcagatcctgatcaagaacacgcctgtacctgcggatcctccgaccaccttcaaccagtcaaagctgaactctttcatcacgcaatacagcaccggacaggtcagcgtggaaattgaatgggagctgcagaaggaaaacagcaagcgctggaaccccgagatccagtacacctccaactactacaaatctacaagtgtggactttgctgttaatacagaaggcgtgtactctgaaccccgccccattggcacccgttacctcacccgtaatctgtaa

SEQ ID NO: 3820 - DNA, 2217 bp, Artificial Sequence
  Description of Artificial Sequence: Synthetic polynucleotide
atggctgccgatggttatcttccagattggctcgaggacaacctctctgagggcattcgcgagtggtgggcgctgaaacctggagccccgaagcccaaagccaaccagcaaaagcaggacgacggccggggtctggtgcttcctggctacaagtacctcggacccttcaacggactcgacaagggggagcccgtcaacgcggcggacgcggcggccctcgagcacgacaaggcctacgaccagcagctgcaggcgggtgacaatccgtacctgcggtataaccacgccgacgccgagtttcaggagcgtctgcaagaagatacgtcttttgggggcaacctcgggcgagcagtcttccaggccaagaagcgggttctcgaacctctcggtctggttgaggaaggcgctaagacggctcctggaaagaagagaccggtagagccatcaccccagcgttctccagactcctctacgggcatcggcaagaagggccaacagcccgccagaaaaagactcaattttggtcagactggcgactcagagtcagttccagaccctcaacctctcggagaacctccagcagcgccctctggtgtgggacctaatacaatggctgcaggcggtggcgcaccaatggcagacaataacgaaggcgccgacggagtgggtagttcctcgggaaattggcattgcgattccacatggctgggcgacagagtcatcaccaccagcacccgaacctgggccctgcccacctacaacaaccacctctacaagcaaatctccaacgggacatcgggaggagccaccaacgacaacacctacttcggctacagcaccccctgggggtattttgactttaacagattccactgccacttttcaccacgtgactggcagcgactcatcaacaacaactggggattccggcccaagagactcagcttcaagctcttcaacatccaggtcaaggaggtcacgcagaatgaaggcaccaagaccatcgccaataacctcaccagcaccatccaggtgtttacggactcggagtaccagctgccgtacgttctcggctctgcccaccagggctgcctgcctccgttcccggcggacgtgttcacgattccccagtacggctacctaacactcaacaacggtagtcaggccgtgggacgctcctccttctactgcctggaatactttccttcgcagatgctgagaaccggcaacaacttccagtttacttacaccttcgaggacgtgcctttccacagcagctacgcccgcagccagagcttggaccggctgatgaatcctctgattgaccagtacctgtactacttgtctcggattcaaacaacaggaggcacggcaaatacgcagactctgggcttcagccaaggtgggcctaatacaatggccaatcaggcaaagaactggctgccaggaccctgttaccgccaacaacgcgtctcaacgacaaccgggcaaaacaacaatagcaactttgcctggactgctgggaccaaataccatctgaatggaagaaattcattggctaatcctggcatcgctatggcaacacacaaagacgacgaggagcgtttttttcccagtaacgggatcctgatttttggcaaacaaaatgctgccagagacaatgcggattacagcgatgtcatgcccaccagcgaggaagaaatcaaaaccactaaccctgtggccacagaggaatacggtatcgtggcagataacttgcagcagcaaaacacggctcctcaaattggaactgtcaacagccagggggccttacccggtatggtctggcagaaccgggacgtgtacctgcagggtcccatctgggccaagattcctcacacggacggcaacttccacccgtctccgctgatgggcggctttggcctgaaacatcctccgcctcagatcctgatcaagaacacgcctgtacctgcggatcctccgaccaccttcaaccagtcaaagctgaactctttcatcacgcaatacagcaccggacaggtcagcgtggaaattgaatgggagctgcagaaggaaaacagcaagcgctggaaccccgagatccagtacacctccaactactacaaatctacaagtgtggactttgctgttaatacagaaggcgtgtactctgaaccccgccccattggcacccgttacctcacccgtaatctgtaa

SEQ ID NO: 3821 - DNA, 2217 bp, Artificial Sequence
  Description of Artificial Sequence: Synthetic polynucleotide
atggctgccgatggttatcttccagattggctcgaggacaacctctctgagggcattcgcgagtggtgggcgctgaaacctggagccccgaagcccaaagccaaccagcaaaagcaggacgacggccggggtctggtgcttcctggctacaagtacctcggacccttcaacggactcgacaagggggagcccgtcaacgcggcggacgcggcggccctcgagcacgacaaggcctacgaccagcagctgcaggcgggtgacaatccgtacctgcggtataaccacgccgacgccgagtttcaggagcgtctgcaagaagatacgtcttttgggggcaacctcgggcgagcagtcttccaggccaagaagcgggttctcgaacctctcggtctggttgaggaaggcgctaagacggctcctggaaagaagagaccggtagagccatcaccccagcgttctccagactcctctacgggcatcggcaagaagggccaacagcccgccagaaaaagactcaattttggtcagactggcgactcagagtcagttccagaccctcaacctctcggagaacctccagcagcgccctctggtgtgggacctaatacaatggctgcaggcggtggcgcaccaatggcagacaataacgaaggcgccgacggagtgggtagttcctcgggaaattggcattgcgattccacatggctgggcgacagagtcatcaccaccagcacccgaacctgggccctgcccacctacaacaaccacctctacaagcaaatctccaacgggacatcgggaggagccaccaacgacaacacctacttcggctacagcaccccctgggggtattttgactttaacagattccactgccacttttcaccacgtgactggcagcgactcatcaacaacaactggggattccggcccaagagactcagcttcaagctcttcaacatccaggtcaaggaggtcacgcagaatgaaggcaccaagaccatcgccaataacctcaccagcaccatccaggtgtttacggactcggagtaccagctgccgtacgttctcggctctgcccaccagggctgcctgcctccgctcccggcggacgtgttcacgattccccagtacggctacctaacactcaacaacggtagtcaggccgtgggacgctcctccttctactgcctggaatactttccttcgcagatgctgagaaccggcaacaacttccagtttacttacaccttcgaggacgtgcctttccacagcagctacgcccacagccagagcttggaccggctgatgaatcctctgattgaccagtacctgtactacttgtctcggattcaaacaacaggaggcacggcaaatacgcagactctgggcttcagccaaggtgggcctaatacaatggccaatcaggcaaagaactggctgccaggaccctgttaccgccaacaacgcgtctcaacgacaaccgggcaaaacaacaatagcaactttgcctggactgctgggaccaaataccatctgaatggaagaaattcattggctaatcctggcatcgctatggcaacacacaaagacgacgaggagcgtttttttcccagtaacgggatcctgatttttggcaaacaaaatgctgccagagacaatgcggattacagcgatgtcatgcccaccagcgaggaagaaatcaaaaccactaaccctgtggccacagaggaatacggtatcgtggcagataacttgcagcagcaaaacacggctcctcaaattggaactgtcaacagccagggggccttacccggtatggtctggcagaaccgggacgtgtacctgcagggtcccatctgggccaagattcctcacacggacggcaacttccacccgtctccgctgatgggcggctttggcctgaaacatcctccgcctcagatcctgatcaagaacacgcctgtacctgcggatcctccgaccaccttcaaccagtcaaagctgaactctttcatcacgcaatacagcaccggacaggtcagcgtggaaattgaatgggagctgcagaaggaaaacagcaagcgctggaaccccgagatccagtacacctccaactactacaaatctacaagtgtggactttgctgttaatacagaaggcgtgtactctgaaccccgccccattggcacccgttacctcacccgtaatctgtaa

SEQ ID NO: 3822 - DNA, 2217 bp, Artificial Sequence
  Description of Artificial Sequence: Synthetic polynucleotide
atggctgccgatggttatcttccagattggctcgaggacaacctctctgagggcattcgcgagtggtgggcgctgaaacctggagccccgaagcccaaagccaaccagcaaaagcaggacgacggccggggtctggtgcttcctggctacaagtacctcggacccttcaacggactcgacaagggggagcccgtcaacgcggcggacgcggcggccctcgagcacgacaaggcctacgaccagcagctgcaggcgggtgacaatccgtacctgcggtataaccacgccgacgccgagtttcaggagcgtctgcaagaagatacgtcttttgggggcaacctcgggcgagcagtcttccaggccaagaagcgggttctcgaacctctcggtctggttgaggaaggcgctaagacggctcctggaaagaagagaccggtagagccatcaccccagcgttctccagactcctctacgggcatcggcaagaagggccaacagcccgccagaaaaagactcaattttggtcagactggcgactcagagtcagttccagaccctcaacctctcggagaacctccagcagcgccctctggtgtgggacctaatacaatggctgcaggcggtggcgcaccaatggcagacaataacgaaggcgccgacggagtgggtagttcctcgggaaattggcattgcgattccacatggctgggcgacagagtcatcaccaccagcacccgaacccgggccctgcccacctacaacaaccacctctacaagcaaatctccaacgggacatcgggaggagccaccaacgacaacacctacttcggctacagcaccccctgggggtattttgactttaacagattccactgccacttttcaccacgtgactggcagcgactcatcaacaacaactggggattccggcccaagagactcagcttcaagctcttcaacatccaggtcaaggaggtcacgcagaatgaaggcaccaagaccatcgccaataacctcaccagcaccatccaggtgtttacggactcggagtaccagctgccgtacgttctcggctctgcccaccagggctgcctgcctccgttcccggcggacgtgttcacgattccccagtacggctacctaacactcaacaacggtagtcaggccgtgggacgctcctccttctactgcctggaatactttccttcgcagatgctgagaaccggcaacaacttccagtttacttacaccttcgaggacgtgcctttccacagcagctacgcccacagccagagcttggaccggctgatgaatcctctgattgaccagtacctgtactacttgtctcggattcaaacaacaggaggcacggcaaatacgcagactctgggcttcagccaaggtgggcctaatacaatggccaatcaggcaaagaactggctgccaggaccctgttaccgccaacaacgcgtctcaacgacaaccgggcaaaacaacaatagcaactttgcctggactgctgggaccaaataccatctgaatggaagaaattcattggctaatcctggcatcgctatggcaacacacaaagacgacgaggagcgtttttttcccagtaacgggatcctgatttttggcaaacaaaatgctgccagagacaatgcggattacagcgatgtcatgcccaccagcgaggaagaaatcaaaaccactaaccctgtggccacagaggaatacggtatcgtggcagataacttgcagcagcaaaacacggctcctcaaattggaactgtcaacagccagggggccttacccggtatggtctggcagaaccgggacgtgtacctgcagggtcccatctgggccaagattcctcacacggacggcaacttccacccgtctccgctgatgggcggctttggcctgaaacatcctccgcctcagatcctgatcaagaacacgcctgtacctgcggatcctccgaccaccttcaaccagtcaaagctgaactctttcatcacgcaatacagcaccggacaggtcagcgtggaaattgaatgggagctgcagaaggaaaacagcaagcgctggaaccccgagatccagtacacctccaactactacaaatctacaagtgtggactttgctgttaatacagaaggcgtgtactctgaaccccgccccattggcacccgttacctcacccgtaatctgtaa

SEQ ID NO: 3823 - DNA, 2217 bp, Artificial Sequence
  Description of Artificial Sequence: Synthetic polynucleotide
atggctgccgatggttatcttccagattggctcgaggacaacctctctgagggcattcgcgagtggtgggcgctgaaacctggagccccgaagcccaaagccaaccagcaaaagcaggacgacggccggggtctggtgcttcctggctacaagtacctcggacccttcaacggactcgacaagggggagcccgtcaacgcggcggacgcggcggccctcgagcacgacaaggcctacgaccagcagctgcaggcgggtgacaatccgtacctgcggtataaccacgccgacgccgagtttcaggagcgtctgcaagaagatacgtcttttgggggcaacctcgggcgagcagtcttccaggccaagaagcgggttctcgaacctctcggtctggttgaggaaggcgctaagacggctcctggaaagaagagaccggtagagccatcaccccagcgttctccagactcctctacgggcatcggcaagaagggccaacagcccgccagaaaaagactcaattttggtcagactggcgactcagagtcagttccagaccctcaacctctcggagaacctccagcagcgccctctggtgtgggacctaatacaatggctgcaggcggtggcgcaccaatggcagacaataacgaaggcgccgacggagtgggtagttcctcgggaaattggcattgcgattccacatggctgggcgacagagtcatcaccaccagcacccgaacctgggccctgcccacctacaacaaccacctctacaagcaaatctccaacgggacatcgggaggagccaccaacgacaacacctacttcggctacagcaccccctgggggtattttgactttaacagattccactgccacttttcaccacgtgactggcagcgactcatcaacaacaactggggattccggcccaagagactcagcttcaagctcttcaacatccaggtcaaggaggtcacgcagaatgaaggcaccaagaccatcgccaataacctcaccagcaccatccaggtgtttacggactcggagtaccagctgccgtacgttctcggctctgcccaccagggctgcctgcctccgttcccggcggacgtgttcacgattccccagtacggctacctaacactcaacaacggtagtcaggccgtgggacgctcctccttctactgcctggaatactttccttcgcagatgctgagaaccggcaacaacttccagtttacttacaccttcgaggacgtgcctttccacagcagctacgcccacagccagagcttggaccggctgatgaatcctctgattgaccagtacctgtactacttgtctcggattcaaacaacaggaggcacggcaaatacgcagactctgggcttcagccaaggtgggcctaatacaatggccaatcaggcaaagaactggctgccaggaccctgttaccgccaacaacgcgtctcaacgacaaccgggcaaaacaacaatagcaactttgcctggactgctgggaccaaataccatctgaatggaagaaattcattggctaatcctggcatcgctatgacaacacacaaagacgacgaggagcgtttttttcccagtaacgggatcctgatttttggcaaacaaaatgctgccagagacaatgcggattacagcgatgtcatgcccaccagcgaggaagaaatcaaaaccactaaccctgtggccacagaggaatacggtatcgtggcagataacttgcagcagcaaaacacggctcctcaaattggaactgtcaacagccagggggccttacccggtatggtctggcagaaccgggacgtgtacctgcagggtcccatctgggccaagattcctcacacggacggcaacttccacccgtctccgctgatgggcggctttggcctgaaacatcctccgcctcagatcctgatcaagaacacgcctgtacctgcggatcctccgaccaccttcaaccagtcaaagctgaactctttcatcacgcaatacagcaccggacaggtcagcgtggaaattgaatgggagctgcagaaggaaaacagcaagcgctggaaccccgagatccagtacacctccaactactacaaatctacaagtgtggactttgctgttaatacagaaggcgtgtactctgaaccccgccccattggcacccgttacctcacccgtaatctgtaa

SEQ ID NO: 3824 - DNA, 2217 bp, Artificial Sequence
  Description of Artificial Sequence: Synthetic polynucleotide
atggctgccgatggttatcttccagattggctcgaggacaacctctctgagggcattcgcgagtggtgggcgctgaaacctggagccccgaagcccaaagccaaccagcaaaagcaggacgacggccggggtctggtgcttcctggctacaagtacctcggacccttcaacggactcgacaagggggagcccgtcaacgcggcggacgcggcggccctcgagcacgacaaggcctacgaccagcagctgcaggcgggtgacaatccgtacctgcggtataaccacgccgacgccgagtttcaggagcgtctgcaagaagatacgtcttttgggggcaacctcgggcgagcagtcttccaggccaagaagcgggttctcgaacctctcggtctggttgaggaaggcgctaagacggctcctggaaagaagagaccggtagagccatcaccccagcgttctccagactcctctacgggcatcggcaagaagggccaacagcccgccagaaaaagactcaattttggtcagactggcgactcagagtcagttccagaccctcaacctctcggagaacctccagcagcgccctctggtgtgggacctaatacaatggctgcaggcggtggcgcaccaatggcagacaataacgaaggcgccgacggagtgggtagttcctcgggaaattggcattgcgattccacatggctgggcgacagagtcatcaccaccagcacccgaacctgggccctgcccacctacaacaaccacctctacaagcaaatctccaacgggacatcgggaggagccaccaacgacaacacctacttcggctacagcaccccctgggggtattttgactttaacagattccactgccacttttcaccacgtgactggcagcgactcatcaacaacaactggggattccggcccaagagactcagcttcaagctcttcaacatccaggtcaaggaggtcacgcagaatgaaggcaccaagaccatcgccaataacctcaccagcaccatccaggtgtttacggactcggagtaccagctgccgtacgttctcggctctgcccaccagggctgcctgcctccgttcccggcggacgtgttcacgattccccagtacggctacctaacactcaacaacggtagtcaggccgtgggacgctcctccttctactgcctggaatactttccttcgcagatgctgagaaccggcaacaacttccagtttacttacaccttcgaggacgtgcctttccacagcagctacgcccacagccagagcttggaccggctgatgaatcctctgattgaccagtacctgtactacttgtctcggattcaaacaacaggaggcacggcaaatacgcagactctgggcttcagccaaggtgggcctaatacaatggccaatcaggcaaagaactggctgccaggaccctgttaccgccaacaacgcgtctcaacgacaaccgggcaaaacaacaatagcaactttgcctggactgctgggaccaaataccatctgaatggaagaaattcattggctaatcctggcatcgctatggcaacacacaaagacgacgaggagcgtttttttcccagtaacgggatcctgatttttggcaaacaaaatgctgccagagacaatgcggattacagcgatgtcatgcccaccagcgaggaagaaatcaaaaccactaaccctgtggccacagaggaatacggtatcgtggcagataacttgcagcagcaaaacacggctcctcaaattggaactgtcaacagccagggggtcttacccggtatggtctggcagaaccgggacgtgtacctgcagggtcccatctgggccaagattcctcacacggacggcaacttccacccgtctccgctgatgggcggctttggcctgaaacatcctccgcctcagatcctgatcaagaacacgcctgtacctgcggatcctccgaccaccttcaaccagtcaaagctgaactctttcatcacgcaatacagcaccggacaggtcagcgtggaaattgaatgggagctgcagaaggaaaacagcaagcgctggaaccccgagatccagtacacctccaactactacaaatctacaagtgtggactttgctgttaatacagaaggcgtgtactctgaaccccgccccattggcacccgttacctcacccgtaatctgtaa

SEQ ID NO: 3825 - DNA, 2217 bp, Artificial Sequence
  Description of Artificial Sequence: Synthetic polynucleotide
atggctgccgatggttatcttccagattggctcgaggacaacctctctgagggcattcgcgagtggtgggcgctgaaacctggagccccgaagcccaaagccaaccagcaaaagcaggacgacggccggggtctggtgcttcctggctacaagtacctcggacccttcaacggactcgacaagggggagcccgtcaacgcggcggacgcggcggccctcgagcacgacaaggcctacgaccagcagctgcaggcgggtgacaatccgtacctgcggtataaccacgccgacgccgagtttcaggagcgtctgcaagaagatacgtcttttgggggcaacctcgggcgagcagtcttccaggccaagaagcgggttctcgaacctctcggtctggttgaggaaggcgctaagacggctcctggaaagaagagaccggtagagccatcaccccagcgttctccagactcctctacgggcatcggcaagaagggccaacagcccgccagaaaaagactcaattttggtcagactggcgactcagagtcagttccagaccctcaacctctcggagaacctccagcagcgccctctggtgtgggacctaatacaatggctgcaggcggtggcgcaccaatggcagacaataacgaaggcgccgacggagtgggtagttcctcgggaaattggcattgcgattccacatggctgggcgacagagtcatcaccaccagcacccgaacctgggccctgcccacctacaacaaccacctctacaagcaaatctccaacgggacatcgggaggagccaccaacgacaacacctacttcggctacagcaccccctgggggtattttgactttaacagattccactgccacttttcaccacgtgactggcagcgactcgtcaacaacaactggggattccggcccaagagactcagcttcaagctcttcaacatccaggtcaaggaggtcacgcagaatgaaggcaccaagaccatcgccaataacctcaccagcaccatccaggtgtttacggactcggagtaccagctgccgtacgttctcggctctgcccaccagggctgcctgcctccgttcccggcggacgtgttcacgattccccagtacggctacctaacactcaacaacggtagtcaggccgtgggacgctcctccttctactgcctggaatactttccttcgcagatgctgagaaccggcaacaacttccagtttacttacaccttcgaggacgtgcctttccacagcagctacgcccacagccagagcttggaccggctgatgaatcctctgattgaccagtacctgtactacttgtctcggattcaaacaacaggaggcacggcaaatacgcagactctgggcttcagccaaggtgggcctaatacaatggccaatcaggcaaagaactggctgccaggaccctgttaccgccaacaacgcgtctcaacgacaaccgggcaaaacaacaatagcaactttgcctggactgctgggaccaaataccatctgaatggaagaaattcattggctaatcctggcatcgctatggcaacacacaaagacgacgaggagcgtttttttcccagtaacgggatcctgatttttggcaaacaaaatgctgccagagacaatgcggattacagcgatgtcatgcccaccagcgaggaagaaatcaaaaccactaaccctgtggccacagaggaatacggtatcgtggcrgataacttgcagcagcaaaacacggctcctcaaattggaactgtcaacagccagggggccttacccggtatggtctggcagaaccgggacgtgtacctgcagggtcccatctgggccaagattcctcacacggacggcaacttccacccgtctccgctgatgggcggctttggcctgaaacatcctccgcctcagatcctgatcaagaacacgcctgtacctgcggatcctccgaccaccttcaaccagtcaaagctgaactctttcatcacgcaatacagcaccggacaggtcagcgtggaaattgaatgggagctgcagaaggaaaacagcaagcgctggaaccccgagatccagtacacctccaactactacaaatctacaagtgtggactttgctgttaatacagaaggcgtgtactctgaaccccgccccattggcacccgttacctcacccgtaatctgtaa

SEQ ID NO: 3826 - DNA, 2217 bp, Artificial Sequence
  Description of Artificial Sequence: Synthetic polynucleotide
atggctgccgatggttatcttccagattggctcgaggacaacctctctgagggcattcgcgagtggtgggcgctgaaacctggagccccgaagcccaaagccaaccagcaaaagcaggacgacggccggggtctggtgcttcctggctacaagtacctcggacccttcaacggactcgacaagggggagcccgtcaacgcggcggacgcggcggccctcgagcacgacaaggcctacgaccagcagctgcaggcgggtgacaatccgtacctgcggtataaccacgccgacgccgagtttcgggagcgtctgcaagaagatacgtcttttgggggcaacctcgggcgagcagtcttccaggccaagaagcgggttctcgaacctctcggtctggttgaggaaggcgctaagacggctcctggaaagaagagaccggtagagccatcaccccagcgttctccagactcctctacgggcatcggcaagaagggccaacagcccgccagaaaaagactcaattttggtcagactggcgactcagagtcagttccagaccctcaacctctcggagaacctccagcagcgccctctggtgtgggacctaatacaatggctgcaggcggtggcgcaccaatggcagacaataacgaaggcgccgacggagtgggtagttcctcgggaaattggcattgcgattccacatggctgggcgacagagtcatcaccaccagcacccgaacctgggccctgcccacctacaacaaccacctctacaagcaaatctccaacgggacatcgggaggagccaccaacgacaacacctacttcggctacagcaccccctgggggtattttgactttaacagattccactgccacttttcaccacgtgactggcagcgactcatcaacaacaactggggattccggcccaagagactcagcttcaagctcttcaacatccaggtcaaggaggtcacgcagaatgaaggcaccaagaccatcgccaataacctcaccagcaccatccaggtgtttacggactcggagtaccagctgccgtacgttctcggctctgcccaccagggctgcctgcctccgttcccggcggacgtgttcacgattccccagtacggctacctaacactcaacaacggtagtcaggccgtgggacgctcctccttctactgcctggaatactttccttcgcagatgctgagaaccggcaacaacttccagtttacttacaccttcgaggacgtgcctttccacagcagctacgcccacagccagagcttggaccggctgatgaatcctctgattgaccagtacctgtactacttgtctcggattcaaacaacaggaggcacggcaaatacgcagactctgggcttcagccaaggtgggcctaatacaatggccaatcaggcaaagaactggctgccaggaccctgttaccgccaacaacgcgtctcaacgacaaccgggcaaaacaacaatagcaactttgcctggactgctgggaccaaataccatctgaatggaagaaattcattggctaatcctggcatcgctatggcaacacacaaagacgacgaggagcgtttttttcccagtaacgggatcctgatttttggcaaacaaaatgctgccagagacaatgcggattacagcgatgtcatgcccaccagcgaggaagaaatcaaaaccactaaccctgtggccacagaggaatacggtatcgtggcagataacttgcagcagcaaaacacggctcctcaaattggaactgtcaacagccagggggccttacccggtatggtctggcagaaccgggacgtgtacctgcagggtcccatctgggccaagattcctcacacggacggcaacttccacccgtctccgctgatgggcggctttggcctgaaacatcctccgcctcagatcctgatcaagaacacgcctgtacctgcggatcctccgaccaccttcaaccagtcaaagctgaactctttcatcacgcaatacagcaccggacaggtcagcgtggaaattgaatgggagctgcagaaggaaaacagcaagcgctggaaccccgagatccagtacacctccaactactacaaatctacaagtgtggactttgctgttaatacagaaggcgtgtactctgaaccccgccccattggcacccgttacctcacccgtaatctgtaa

SEQ ID NO: 3827 - DNA, 2217 bp, Artificial Sequence
  Description of Artificial Sequence: Synthetic polynucleotide
atggctgccgatggttatcttccagattggctcgaggacaacctctctgagggcattcgcgagtggtgggcgctgaaacctggagccccgaagcccaaagccaaccagcaaaagcaggacgacggccggggtctggtgcttcctggctacaagtacctcggacccttcaacggactcgacaagggggagcccgtcaacgcggcggacgcggcggccctcgagcacgacaaggcctacgaccagcagctgcaggcgggtgacaatccgtacctgcggtataaccacgccgacgccgagtttcaggagcgtctgcaagaagatacgtcttttgggggcaacctcgggcgagcagtcttccaggccaagaagcgggttctcgaacctctcggtctggttgaggaaggcgctaagacggctcctggaaagaagagaccggtagagccatcaccccagcgttctccagactcctctacgggcatcggcaagaagggccaacagcccgccagaaaaagactcaattttggtcagactggcgactcagagtcagttccagaccctcaacctctcggagaacctccagcagcgccctctggtgtgggacctaatacaatggctgcaggcggtggcgcaccaatggcagacaataacgaaggcgccgacggagtgggtagttcctcgggaaattggcattgcgattccacatggctgggcgacagagtcatcaccaccagcacccgaacctgggccctgcccacctacaacaaccacctctacaagcaaatctccaacgggacatcgggaggagccaccaacgacaacacctacttcggctacagcaccccctgggggtattttgactttaacagattccactgccacttttcaccacgtgactggcagcgactcatcaacaacaactggggattccggcccaagagactcagcttcaagctcttcaacatccaggtcaaggaggtcacgcagaatgaaggcaccaagaccatcgccaataacctcaccagcaccatccaggtgtttacggactcggagtaccagctgccgtacgttctcggctctgcccaccagggctgcctgcctccgttcccggcggacgtgttcacgattccccagtacggctacccaacactcaacaacggtagtcaggccgtgggacgctcctccttctactgcctggaatactttccttcgcagatgctgagaaccggcaacaacttccagtttacttacaccttcgaggacgtgcctttccacagcagctacgcccacagccagagcttggaccggctgatgaatcctctgattgaccagtacctgtactacttgtctcggattcaaacaacaggaggcacggcaaatacgcagactctgggcttcagccaaggtgggcctaatacaatggccaatcaggcaaagaactggctgccaggaccctgttaccgccaacaacgcgtctcaacgacaaccgggcaaaacaacaatagcaactttgcctggactgctgggaccaaataccatctgaatggaagaaattcattggctaatcctggcatcgctatggcaacacacaaagacgacgaggagcgtttttttcccagtaacgggatcctgatttttggcaaacaaaatgctgccagagacaatgcggattacagcgatgtcatgcccaccagcgaggaagaaatcaaaaccactaaccctgtggccacagaggaatacggtatcgtggcagataacttgcagcagcaaaacacggctcctcaaattggaactgtcaacagccagggggccttacccggtatggtctggcagaaccgggacgtgtacctgcagggtcccatctgggccaagattcctcacacggacggcaacttccacccgtctccgctgatgggcggctttggcctgaaacatcctccgcctcagatcctgatcaagaacacgcctgtacctgcggatcctccgaccaccttcaaccagtcaaagctgaactctttcatcacgcaatacagcaccggacaggtcagcgtggaaattgaatgggagctgcagaaggaaaacagcaagcgctggaaccccgagatccagtacacctccaactactacaaatctacaagtgtggactttgctgttaatacagaaggcgtgtactctgaaccccgccccattggcacccgttacctcacccgtaatctgtaa

SEQ ID NO: 3828 - DNA, 2217 bp, Artificial Sequence
  Description of Artificial Sequence: Synthetic polynucleotide
atggctgccgatggttatcttccagattggctcgaggacaacctctctgagggcattcgcgagtggtgggcgctgaaacctggagccccgaagcccaaagccaaccagcaaaagcaggacgacggccggggtctggtgcttcctggctacaagtacctcggacccttcaacggactcgacaagggggagcccgtcaacgcggcggacgcggcggccctcgagcacgacaaggcctacgaccagcagctgcaggcgggtgacaatccgtacctgcggtataaccacgccgacgccgagtttcaggagcgtctgcaagaagatacgtcttttgggggcaacctcgggcgagcagtcttccaggccaagaagcgggttctcgaacctctcggtctggttgaggaaggcgctaagacggctcctggaaagaagagaccggtagagccatcaccccagcgttctccagactcctctacgggcatcggcaagaagggccaacagcccgccagaaaaagactcaattttggtcagactggcgactcagagtcagttccagaccctcaacctctcggagaacctccagcagcgccctctggtgtgggacctaatacaatgactgcaggcggtggcgcaccaatggcagacaataacgaaggcgccgacggagtgggtagttcctcgggaaattggcattgcgattccacatggctgggcgacagagtcatcaccaccagcacccgaacctgggccctgcccacctacaacaaccacctctacaagcaaatctccaacgggacatcgggaggagccaccaacgacaacacctacttcggctacagcaccccctgggggtattttgactttaacagattccactgccacttttcaccacgtgactggcagcgactcatcaacaacaactggggattccggcccaagagactcagcttcaagctcttcaacatccaggtcaaggaggtcacgcagaatgaaggcaccaagaccatcgccaataacctcaccagcaccatccaggtgtttacggactcggagtaccagctgccgtacgttctcggctctgcccaccagggctgcctgcctccgttcccggcggacgtgttcacgattccccagtacggctacctaacactcaacaacggtagtcaggccgtgggacgctcctccttctactgcctggaatactttccttcgcagatgctgagaaccggcaacaacttccagtttacttacaccttcgaggacgtgcctttccacagcagctacgcccacagccagagcttggaccggctgatgaatcctctgattgaccagtacctgtactacttgtctcggattcaaacaacaggaggcacggcaaatacgcagactctgggcttcagccaaggtgggcctaatacaatggccaatcaggcaaagaactggctgccaggaccctgttaccgccaacaacgcgtctcaacgacaaccgggcaaaacaacaatagcaactttgcctggactgctgggaccaaataccatctgaatggaagaaattcattggctaatcctggcatcgctatggcaacacacaaagacgacgaggagcgtttttttcccagtaacgggatcctgatttttggcaaacaaaatgctgccagagacaatgcggattacagcgatgtcatgcccaccagcgaggaagaaatcaaaaccactaaccctgtggccacagaggaatacggtatcgtggcagataacttgcagcagcaaaacacggctcctcaaattggaactgtcaacagccagggggccttacccggtatggtctggcagaaccgggacgtgtacctgcagggtcccatctgggccaagattcctcacacggacggcaacttccacccgtctccgctgatgggcggctttggcctgaaacatcctccgcctcagatcctgatcaagaacacgcctgtacctgcggatcctccgaccaccttcaaccagtcaaagctgaactctttcatcacgcaatacagcaccggacaggtcagcgtggaaattgaatgggagctgcagaaggaaaacagcaagcgctggaaccccgagatccagtacacctccaactactacaaatctacaagtgtggactttgctgttaatacagaaggcgtgtactctgaaccccgccccattggcacccgttacctcacccgtaatctgtaa

SEQ ID NO: 3829 - DNA, 2217 bp, Artificial Sequence
  Description of Artificial Sequence: Synthetic polynucleotide
atggctgccgatggttatcttccagattggctcgaggacaacctctctgagggcattcgcgagtggtgggcgctgaaacctggagccccgaagcccaaagccaaccagcaaaagcaggacgacggccggggtctggtgcttcctggctacaagtacctcggacccttcaacggactcgacaagggggagcccgtcaacgcggcggacgcggcggccctcgagcacgacaaggcctacgaccagcagctgcaggcgggtgacaatccgtacctgcggtataaccacgccgacgccgagtttcaggagcgtctgcaagaagatacgtcttttgggggcaacctcgggcgagcagtcttccaggccaagaagcgggttctcgaacctctcggtctggttgaggaaggcgctaagacggctcctggaaagaagagaccggtagagccatcaccccagcgttctccagactcctctacgggcatcggcaagaagggccaacagcccgccagaaaaagactcaattttggtcagactggcgactcagagtcagttccagaccctcaacctctcggagaacctccagcagcgccctctggtgtgggacctaatacaatggctgcaggcggtggcgcaccaatggcagacaataacgaaggcgccgacggagtgggtagttcctcgggaaattggcattgcgattccacatggctgggcgacagagtcatcaccaccagcacccgaacctgggccctgcccacctacaacaaccacctctacaagcaaatctccaacgggacatcgggaggagccaccaacgacaacacctacttcggctacagcaccccctgggggtattttgactttaacagattccactgccacttttcaccacgtgactggcagcgactcatcaacaacaactggggattccggcccaagagactcagcttcaagctcttcaacatccaggtcaaggaggtcacgcagaatgaaggcaccaagaccatcgccaataacctcaccagcaccatccaggtgtttacggactcggagtaccagctgccgtacgttctcggctctgcccaccagggctgcctgcctccgttcccggcggacgtgttcacgattccccagtacggctacctaacactcaacaacggtagtcaggccgtgggacgctcctccttctactgcctggaatactttccttcgcagatgctgagaaccggcaacaacttccagtttacttacaccttcgaggacgtgcctttccacagcagctacgcccacagccagagcttggaccggctgatgaatcctctgattgaccagtacctgtactacttgtctcggattcaaacaacaggaggcacggcaaatacgcagactctgggcttcagccaaggtgggcctaatacaatggccaatcaggcaaagaactggctgccaggaccctgttaccgccaacaacgcgtctcaacgacaaccgggcaaaacaacaatagcaactttgcctggactgctgggaccaaataccatctgaatggaagaaattcattggctaatcctggcatcgctatggcaacacacaaagacgacgaggagcgtttttttcccagtaacgggatcctgatttttggcaaacaaaatgctgccagagacaatgcggattacagcgatgtcatgcccaccagcgaggaagaaatcaaaaccactaaccctgtggccacagaggaatacggtatcgtgacagataacttgcagcagcaaaacacggctcctcaaattggaactgtcaacagccagggggccttacccggtatggtctggcagaaccgggacgtgtacctgcagggtcccatctgggccaagattcctcacacggacggcaacttccacccgtctccgctgatgggcggctttggcctgaaacatcctccgcctcagatcctgatcaagaacacgcctgtacctgcggatcctccgaccaccttcaaccagtcaaagctgaactctttcatcacgcaatacagcaccggacaggtcagcgtggaaattgaatgggagctgcagaaggaaaacagcaagcgctggaaccccgagatccagtacacctccaactactacaaatctacaagtgtggactttgctgttaatacagaaggcgtgtactctgaaccccgccccattggcacccgttacctcacccgtaatctgtaa

SEQ ID NO: 3830 - DNA, 2217 bp, Artificial Sequence
  Description of Artificial Sequence: Synthetic polynucleotide
atggctgccgatggttatcttccagattggctcgaggacaacctctctgagggcattcgcgagtggtgggcgctgaaacctggagccccgaagcccaaagccaaccagcaaaagcaggacgacggccggggtctggtgcttcctggctacaagtacctcggacccttcaacggactcgacaagggggagcccgtcaacgcggcggacgcggcggccctcgagcacgacaaggcctacgaccagcagctgcaggcgggtgacaatccgtacctgcggtataaccacgccgacgccgagtttcaggagcgtctgcaagaagatacgtcttttgggggcaacctcgggcgagcagtcttccaggccaagaagcgggttctcgaacctctcggtctggttgaggaaggcgctaagacggctcctggaaagaagagaccggtagagccatcaccccagcgttctccagactcctctacgggcatcggcaagaagggccaacagcccgccagaaaaagactcaattttggtcagactggcgactcagagtcagttccagaccctcaacctctcggagaacctccagcagcgccctctggtgtgggacctaatacaatggctgcaggcggtggcgcaccaatggcagacaataacgaaggcgccgacggagtgggtagttcctcgggaaattggcattgcgattccacatggctgggcgacagagtcatcaccaccagcacccgaacctgggccctgcccacctacaacaaccacctctacaagcaaatctccaacgggacatcgggaggagccaccaacgacaacacctacttcggctacagcaccccctgggggtattttgactttaacagattccactgccacttttcaccacgtgactggcagcgactcatcaacaacaactggggattccggcccaagagactcagcttcaagctcttcaacatccaggtcaaggaggtcacgcagaatgaaggcaccaagaccatcgccaataacctcaccagcaccatccaggtgtttacggactcggagtaccagctgccgtacgttctcggctctgcccaccagggctgcctgcctccgttcccggcggacgtgttcacgattccccagtacggctacctaacactcaacaacggtagtcaggccgtgggacgctcctccttctactgcctggaatactttccttcgcagatgctgagaaccggcaacaacttccagtttacttacaccttcgaggacgtgcctttccacagcagctacgcccacagccagagcttggaccggctgatgaatcctctgattgaccagtacctgtactacttgtctcggattcaaacaacaggaggcacggcaaatacgcagactctgggcttcagccaaggtgggcctaatacaatggccaatcaggcaaagaactggctgccaggaccctgttaccgccaacaacgcgtctcaacgacaaccgggcaaaacaacaatagcaactttgcctggactgctgggaccaaataccatctgaatggaagaaattcattggctaatcctggcatcgctatggcaacacacaaagacgacgaggagcgtttttttcccagtaacgggatcctgatttttggcaaacaaaatgctgccagagacaatgcggattacagcgatgtcatgcccaccagcgaggaagaaatcaaaaccactaaccctgtggccacagaggaatacggtatcgtggcagataacttgcagcagcaaaacacggctcctcaaattggaactgtcaacagccagggggccttacccggtatggtctggcagaaccgggacgtgtacctgcagggtcccatctgggccaagattcctcacacggacggcaacttccacccgtctccgctgatgggcggctttggcctgaaacatcctccgcctcagatcctgatcaagaacacgcctgtacctgcggatcctccgaccaccttcaaccagtcaaagctgaactctttcatcacgcaatacagcaccggacaggtcagcgtggaaattgaatgggagctgcagaaggaaaacagcaagcgctggaaccccgagatccagtacacctccaactactacaaatctacaagtgtggactttgctattaatacagaaggcgtgtactctgaaccccgccccattggcacccgttacctcacccgtaatctgtaa

SEQ ID NO: 3831 - DNA, 2217 bp, Artificial Sequence
  Description of Artificial Sequence: Synthetic polynucleotide
atggctgccgatggttatcttccagattggctcgaggacaacctctctgagggcattcgcgagtggtgggcgctgaaacctggagccccgaagcccaaagccaaccagcaaaagcaggacgacggccggggtctggtgcttcctggctacaagtacctcggacccttcaacggactcgacaagggggagcccgtcaacgcggcggacgcggcggccctcgagcacgacaaggcctacgaccagcagctgcaggcgggtgacaatccgtacctgcggtataaccacgccgacgccgagtttcaggagcgtctgcaagaagatacgtcttttgggggcaacctcgggcgagcagtcttccaggccaagaagcgggttctcgaacctctcggtctggttgaggaaggcgctaagacggctcctggaaagaagagaccggtagagccatcaccccagcgttctccagactcctctacgggcatcggcaagaagggccaacagcccgccagaaaaagactcaattttggtcagactggcgactcagagtcagttccagaccctcaacctctcggagaacctccagcagcgccctctggtgtgggacctaatacaatggctgcaggcggtggcgcaccaatggcagacaataacgaaggcgccgacggagtgggtagttcctcgggaaattggcattgcgattccacatggctgggcgacagagtcatcaccaccagcacccgaacctgggccctgcccacctacaacaaccacctctacaagcaaatctccaacgggacatcgggaggagccaccaacgacaacacctacttcggctacagcaccccctgggggtattttgactttaacagattccactgccacttttcaccacgtgactggcagcgactcatcaacaacaactggggattccggcccaagagactcagcttcaagctcttcaacatccaggtcaaggaggtcacgcagaatgaaggcaccaagaccatcgccaataacctcaccagcaccatccaggtgtttacggactcggagtaccagctgccgtacgttctcggctctgcccaccagggctgcctgcctccgttcccggcggacgtgttcacgattccccagtacggctacctaacactcaacaacggtagtcaggccgtgggacgctcctccttctactgcctggaatactttccttcgcagatgctgagaaccggcaacaacttccagtttacttacaccttcgaggacgtgcctttccacagcagctacgcccacagccagagcttggaccggctgatgaatcctctgattgaccagtacctgtactacttgtctcggattcaaacaacaggaggcacggcaaatacgcagactctgggcttcagccaaggtgggcctaatacaatggccaatcaggcaaagaactggctgccaggaccctgttaccgccaacaacgcgtctcaacgacaaccgggcaaaacaacaatagcaactttgcctggactgctgggaccaaataccatctgaatggaagaaattcattggctaatcctggcatcgctatggcaacacacaaagacgacgaggagcgtttttttcccagtaacgggatcctgatttttggcaaacaaaatgctgccagagacaatgcggattacagcgatgtcatgcccaccagcgaggaagaaatcaaaaccactaaccctgtggccacagaggaatacggtatcgtggcagataacttgcagcagcaaaacacggctcctcaaattggaactgtcaacagccagggggccttacccggtatggtctggcagaaccgggacgtgtacctgcagggtcccatctgggccaagattcctcacgcggacggcaacttccacccgtctccgctgatgggcggctttggcctgaaacatcctccgcctcagatcctgatcaagaacacgcctgtacctgcggatcctccgaccaccttcaaccagtcaaagctgaactctttcatcacgcaatacagcaccggacaggtcagcgtggaaattgaatgggagctgcagaaggaaaacagcaagcgctggaaccccgagatccagtacacctccaactactacaaatctacaagtgtggactttgctgttaatacagaaggcgtgtactctgaaccccgccccattggcacccgttacctcacccgtaatctgtaa

SEQ ID NO: 3832 - DNA, 2217 bp, Artificial Sequence
  Description of Artificial Sequence: Synthetic polynucleotide
atggctgccgatggttatcttccagattggctcgaggacaacctctctgagggcattcgcgagtggtgggcgctgaaacctggagccccgaagcccaaagccaaccagcaaaagcaggacgacggccggggtctggtgcttcctggctacaagtacctcggacccttcaacggactcgacaagggggagcccgtcaacgcggcggacgcggcggccctcgagcacgacaaggcctacgaccagcagctgcaggcgggtgacaatccgtacctgcggtataaccacgccgacgccgagtttcaggagcgtctgcaagaagatacgtcttttgggggcaacctcgggcgagcagtcttccaggccaagaagcgggttctcgaacctctcggtctggttgaggaaggcgctaagacggctcctggaaagaagagaccggtagagccatcaccccagcgttctccagactcctctacgggcatcggcaagaagggccaacagcccgccagaaaaagactcaattttggtcagactggcgactcagagtcagttccagaccctcaacctctcggagaacctccagcagcgccctctggtgtgggacctaatacaatggctgcaggcggtggcgcaccaatggcagacaataacgaaggcgccgacggagtgggtagttcctcgggaaattggcattgcaattccacatggctgggcgacagagtcatcaccaccagcacccgaacctgggccctgcccacctacaacaaccacctctacaagcaaatctccaacgggacatcgggaggagccaccaacgacaacacctacttcggctacagcaccccctgggggtattttgactttaacagattccactgccacttttcaccacgtgactggcagcgactcatcaacaacaactggggattccggcccaagagactcagcttcaagctcttcaacatccaggtcaaggaggtcacgcagaatgaaggcaccaagaccatcgccaataacctcaccagcaccatccaggtgtttacggactcggagtaccagctgccgtacgttctcggctctgcccaccagggctgcctgcctccgttcccggcggacgtgttcacgattccccagtacggctacctaacactcaacaacggtagtcaggccgtgggacgctcctccttctactgcctggaatactttccttcgcagatgctgagaaccggcaacaacttccagtttacttacaccttcgaggacgtgcctttccacagcagctacgcccacagccagagcttggaccggctgatgaatcctctgattgaccagtacctgtactacttgtctcggattcaaacaacaggaggcacggcaaatacgcagactctgggcttcagccaaggtgggcctaatacaatggccaatcaggcaaagaactggctgccaggaccctgttaccgccaacaacgcgtctcaacgacaaccgggcaaaacaacaatagcaactttgcctggactgctgggaccaaataccatctgaatggaagaaattcattggctaatcctggcatcgctatggcaacacacaaagacgacgaggagcgtttttttcccagtaacgggatcctgatttttggcaaacaaaatgctgccagagacaatgcggattacagcgatgtcatgcccaccagcgaggaagaaatcaaaaccactaaccctgtggccacagaggaatacggtatcgtggcagataacttgcagcagcaaaacacggctcctcaaattggaactgtcaacagccagggggccttacccggtatggtctggcagaaccgggacgtgtacctgcagggtcccatctgggccaagattcctcacacggacggcaacttccacccgtctccgctgatgggcggctttggcctgaaacatcctccgcctcagatcctgatcaagaacacgcctgtacctgcggatcctccgaccaccttcaaccagtcaaagctgaactctttcatcacgcaatacagcaccggacaggtcagcgtggaaattgaatgggagctgcagaaggaaaacagcaagcgctggaaccccgagatccagtacacctccaactactacaaatctacaagtgtggactttgctgttaatacagaaggcgtgtactctgaaccccgccccattggcacccgttacctcacccgtaatctgtaa

SEQ ID NO: 3833 - DNA, 2217 bp, Artificial Sequence
  Description of Artificial Sequence: Synthetic polynucleotide
atggctgccgatggttatcttccagattggctcgaggacaacctctctgagggcattcgcgagtggtgggcgctgaaacctggagccccgaagcccaaagccaaccagcaaaagcaggacgacggccggggtctggtgcttcctggctacaagtacctcggacccttcaacggactcgacaagggggagcccgtcaacgcggcggacgcggcggccctcgagcacgacaaggcctacgaccagcagctgcaggcgggtgacaatccgtacctgcggtataaccacgccgacgccgagtttcaggagcgtctgcaagaagatacgtcttttgggggcaacctcgggcgagcagtcttccaggccaagaagcgggttctcgaacctctcggtctggttgaggaaggcgctaagacggctcctggaaagaagagaccggtagagccatcaccccagcgttctccagactcctctacgggcatcggcaagaagggccaacagcccgccagaaaaagactcaattttggtcagactggcgactcagagtcagttccagaccctcaacctctcggagaacctccagcagcgccctctggtgtgggacctaatacaatggctgcaggcggtggcgcaccaatggcagacaataacgaaggcgccgacggagtgggtagttcctcgggaaattggcattgcgattccacatggctgggcgacagagtcatcaccaccagcacccgaacctgggccctgcccacctacaacaaccacctctacaagcaaatctccaacgggacatcgggaggagccaccaacgacaacacctacttcggctacagcaccccctgggggtattttgactttaacagattccactgccacttttcaccacgtgactggcagcgactcatcaacaacaactggggattccggcccaagagactcagcttcaagctcttcaacatccaggtcaaggaggtcacgcagaatgaaggcaccaagaccatcgccaataacctcaccagcaccatccaggtgtttacggactcggagtaccagctgccgtacgttctcggctctgcccaccagggctgcctgcctccgttcccggcggacgtgttcacgattccccagtacggctacctaacactcaacaacggtagtcaggccgtgggacgctcctccttctactgcctggaatactttccttcgcagatgctgagaaccggcaacaacttccagtttacttacaccttcgaggacgtgcctttccacagcagctacgcccacagccagagcttggaccggctgatgaatcctctgattgaccagtacctgtactacttgtctcggattcaaacaacaggaggcacggcaaatacgcagactctgggcttcagccaaggtgggcctaatacaatggccaatcaggcaaagaactggctgccaggaccctgttaccgccaacaacgcgtctcaacgacaaccgggcaaaacaacaatagcaactttgcctggactgctgggaccaaataccatctgaatggaagaaattcattggctaatcctggcatcgctatggcaacacacaaagacgacgaggagcgtttttttcccagtaacgggatcctgatttttggcaaacaaaatgctgccagagacaatgcggattacagcgatgtcatgcccaccagcgaggaagaaatcaaaaccactaaccctgtggccacagaggaatacggtatcgtggcagataacttgcagcagcaaaacacggctcctcaaattggaactgtcaacagccagggggccttacccggtatggtctggcagaaccgggacgtgtacctgcagggtcccatctgggccaagattcctcacacggacggcaacttccacccgtctccgctgatgggcggctttggcctgaaacatcctccgcctcagatcctgatcaagaacacgcctgtacctgcggatcctccgaccaccttcaaccagtcaaagctgaactctttcatcacgcaatacagcaccggacaggtcagcgtggaaattgaatgggagctgcagaaggaaaacagcaagcgctggaaccccgagatccagtacacctccaactactacaaatctacaagtgtggactttgctgttaatacagaaggcgcgtactctgaaccccgccccattggcacccgttacctcacccgtaatctgtaa

SEQ ID NO: 3834 - DNA, 2217 bp, Artificial Sequence
  Description of Artificial Sequence: Synthetic polynucleotide
atggctgccgatggttatcttccagattggctcgaggacaacctctctgagggcattcgcgagtggtgggcgctgaaacctggagccccgaagcccaaagccaaccagcaaaagcaggacgacggccggggtctggtgcttcctggctacaagtacctcggacccttcaacggactcgacaagggggagcccgtcaacgcggcggacgcggcggccctcgagcacgacaaggcctacgaccagcagctgcaggcgggtgacaatccgtacctgcggtataaccacgccgacgccgagtttcaggagcgtctgcaagaagatacgtcttttgggggcaacctcgggcgagcagtcttccaggccaagaagcgggttctcgaacctctcggtctggttgaggaaggcgctaagacggctcctggaaagaagagaccggtagagccatcaccccagcgttctccagactcctctacgggcatcggcaagaagggccaacagcccgccagaaaaagactcaattttggtcagactggcgactcagagtcagttccagaccctcaacctctcggagaacctccagcagcgccctctggtgtgggacctaatacaatggctgcaggcggtggcgcaccaatggcagacaataacgaaggcgccgacggagtgggtagttcctcgggaaattggcattgcgattccacatggctgggcgacagagtcatcaccaccagcacccgaacctgggccctgcccacctacaacaaccacctctacaagcaaatctccaacgggacatcgggaggagccaccaacgacaacacctacttcggctacagcaccccctgggggtattttgactttaacagattccactgccacttttcaccacgtgactggcagcgactcatcaacaacaactggggattccggcccaagagactcagcttcaagctcttcaacatccaggtcaaggaggtcacgcagaatgaaggcaccaagaccatcgccaataacctcaccagcaccatccaggtgtttacggactcggagtaccagctgccgtacgttctcggctctgcccaccagggctgcctgcctccgttcccggcggacgtgttcacgattccccagtacggctacctaacactcaacaacggtagtcaggccgtgggacgctcctccttctactgcctggaatactttccttcgcagatgctgagaaccggcaacaacttccagtttacttacaccttcgaggacgtgcctttccacagcagctacgcccacagccagagcttggaccggctgatgaatcctctgattgaccagtacctgtactacttgtctcggattcaaacaacaggaggcacggcaaatacgcagactctgggcttcagccaaggtgggcctaatacaatggccaatcaggcaaagaactggctgccaggaccctgttaccgccaacaacgcgtctcaacgacaaccgggcaaaacaacaatagcaactttgcctggactgctgggaccaaataccatctgaatggaagaaattcattggctaatcctggcatcgctatggcaacacacaaagacgacgaggagcgtttttttcccagtaacgggatcctgatttttggcaaacaaaatgctgccagagacaatgcggattacagcgatgtcatgcccaccagcgaggaagaaatcaaaaccactaaccctgtggccacagaggaatgcggtatcgtggcagataacttgcagcagcaaaacacggctcctcaaattggaactgtcaacagccagggggccttacccggtatggtctggcagaaccgggacgtgtacctgcagggtcccatctgggccaagattcctcacacggacggcaacttccacccgtctccgctgatgggcggctttggcctgaaacatcctccgcctcagatcctgatcaagaacacgcctgtacctgcggatcctccgaccaccttcaaccagtcaaagctgaactctttcatcacgcaatacagcaccggacaggtcagcgtggaaattgaatgggagctgcagaaggaaaacagcaagcgctggaaccccgagatccagtacacctccaactactacaaatctacaagtgtggactttgctgttaatacagaaggcgtgtactctgaaccccgccccattggcacccgttacctcacccgtaatctgtaa

SEQ ID NO: 3835 - DNA, 2217 bp, Artificial Sequence
  Description of Artificial Sequence: Synthetic polynucleotide
atggctgccgatggttatcttccagattggctcgaggacaacctctctgagggcattcgcgagtggtgggcgctgaaacctggagccccgaagcccaaagccaaccagcaaaagcaggacgacggccggggtctggtgcttcctggctacaagtacctcggacccttcaacggactcgacaagggggagcccgtcaacgcggcggacgcggcggccctcgagcacgacaaggcctacgaccagcagctgcaggcgggtgacaatccgtacctgcggtataaccacgccgacgccgagtttcaggagcgtctgcaagaagatacgtcttttgggggcaacctcgggcgagcagtcttccaggccaagaagcgggttctcgaacctctcggtctggttgaggaaggcgctaagacggctcctggaaagaagagaccggtagagccatcaccccagcgttctccagactcctctacgggcatcggcaagaagggccaacagcccgccagaaaaagactcaattttggtcagactggcgactcagagtcagttccagaccctcaacctctcggagaacctccagcagcgccctctggtgtgggacctaatacaatggctgcaggcggtggcgcaccaatggcagacaataacgaaggcgccgacggagtgggtagttcctcgggaaattggcattgcgattccacatggctgggcgacagagtcatcaccaccagcacccgaacctgggccctgcccacctacaacaaccacctctacaagcaaatctccaacgggacatcgggaggagccaccaacgacaacacctacttcggctacagcaccccctgggggtattttgactttaacagattccactgccacttttcaccacgtgactggcagcgactcatcaacaacaactggggattccggcccaagagactcagcttcaagctcttcaacatccaggtcaaggaggtcacgcagaatgaaggcaccaagaccatcgccaataacctcaccagcaccatccaggtgtttacggactcggagtaccagctgccgtacgttctcggctctgcccaccagggctgcctgcctccgttcccggcggacgtgttcacgattccccagtacggctacctaacactcaacaacggtagtcaggccgtgggacgctcctccttctactgcctggaatactttccttcgcagatgctgagaaccggcaacaacttccagtttacttacaccttcgaggacgtgcctttccacagcagctacgcccacagccagagcttggaccggctgatgaatcctctgattgaccagtacctgtactacttgtctcggattcaaacaacaggaggcacggcaaatacgcagactctgggcttcagccaaggtgggcctaatacaatggccaatcaggcaaagaactggctgccaggaccctgttaccgccaacaacgcgtctcaacgacaaccgggcaaaacaacaatagcaactttgcctggactgctgggaccaaataccatctgaatggaagaaattcattggctaatcctggcatcgctatggcaacacacaaagacgacgaggagcgtttttttcccagtaacgggatcctgatttttggcaaacaaaatgctgccagagacaatgcggattacagcgatgtcatgcccaccagcgaggaagaaatcaaaaccactaaccctgtggccacagaggaatacggtatcgtggcagataacttgcagcagcaaaacacggctcctcaaattggaactgtcaacagccagggggccttacccggtatggtctggcagaaccgggacgtgtacctgcagggtcccatctgggccaagattcctcacacggacggcaacttccacccgtctccgctgatgggcggctttggcctgaaacatcctccgcctcagatcctgatcaagaacacgcctgtacctgcggatcctccgaccaccttcaaccagtcaaagctgaactctttcatcacgcaatacagcaccggacaggtcagcgtggaaattgaatgggagctgcagaaggaaaacagcaagcgctggaaccccgagatccggtacacctccaactactacaaatctacaagtgtggactttgctgttaatacagaaggcgtgtactctgaaccccgccccattggcacccgttacctcacccgtaatctgtaa

SEQ ID NO: 3836 - DNA, 2217 bp, Artificial Sequence
  Description of Artificial Sequence: Synthetic polynucleotide
atggctgccgatggttatcttccagattggctcgaggacaacctctctgagggcattcgcgagtggtgggcgctgaaacctggagccccgaagcccaaagccaaccagcaaaagcaggacgacggccggggtctggtgcttcctggctacaagtacctcggacccttcaacggactcgacaagggggagcccgtcaacgcggcggacgcggcggccctcgagcacgacaaggcctacgaccagcagctgcaggcgggtgacaatccgtacctgcggtataaccacgccgacgccgagtttcaggagcgtctgcaagaagatacgtcttttgggggcaacctcgggcgagcagtcttccaggccaagaagcgggttctcgaacctctcggtctggttgaggaaggcgctaagacggctcctggaaagaagagaccggtagagccatcaccccagcgttctccagactcctctacgggcatcggcaagaagggccaacagcccgccagaaaaagactcaattttggtcagactggcgactcagagtcagttccagaccctcaacctctcggagaacctccagcagcgccctctggtgtgggacctaatacaatggctgcaggcggtggcgcaccaatggcagacaataacgaaggcgccgacggagtgggtagttcctcgggaaattggcattgcgattccacatggctgggcgacagagtcatcaccaccagcacccgaacctgggccctgcccacctacaacaaccacctctacaagcaaatctccaacgggacatcgggaggagccaccaacgacaacacctacttcggctacagcaccccctgggggtattttgactttaacagattccactgccacttttcaccacgtgactggcagcgactcatcaacaacaactggggattccggcccaagagactcagcttcaagctcttcaacatccaggtcaaggaggtcacgcagaatgaaggcaccaagaccatcgccaataacctcaccagcaccatccaggtgtttacggactcggagtaccagctgccgtacgttctcggctctgcccaccagggctgcctgcctccgttcccggcggacgtgttcacgattccccagtacggctacctaacactcaacaacggtagtcaggccgtgggacgctcctccttctactgcctggaatactttccttcgcagatgctgagaaccggcaacaacttccagtttacttacaccttcgaggacgtgcctttccacagcagctacgcccacagccagagcttggaccggctgatgaatcctctgattgaccagtacctgtactacttgtctcggattcaaacaacaggaggcacggcaaatacgcagactctgggcttcagccaaggtgggcctaatacaatggccaatcaggcaaagaactggctgccaggaccctgttaccgccaacaacgcgtctcaacgacaaccgggcaaaacaacaatagcaactttgcctggactgctgggaccaaataccatctgaatggaagaaattcattggctaatcctggcatcgctatggcaacacacaaagacgacgaggagcgtttttttcccagtaacgggatcctgatttttggcaaacaaaatgctgccagagacaatgcggattgcagcgatgtcatgcccaccagcgaggaagaaatcaaaaccactaaccctgtggccacagaggaatacggtatcgtggcagataacttgcagcagcaaaacacggctcctcaaattggaactgtcaacagccagggggccttacccggtatggtctggcagaaccgggacgtgtacctgcagggtcccatctgggccaagattcctcacacggacggcaacttccacccgtctccgctgatgggcggctttggcctgaaacatcctccgcctcagatcctgatcaagaacacgcctgtacctgcggatcctccgaccaccttcaaccagtcaaagctgaactctttcatcacgcaatacagcaccggacaggtcagcgtggaaattgaatgggagctgcagaaggaaaacagcaagcgctggaaccccgagatccagtacacctccaactactacaaatctacaagtgtggactttgctgttaatacagaaggcgtgtactctgaaccccgccccattggcacccgttacctcacccgtaatctgtaa

SEQ ID NO: 3837 - DNA, 2217 bp, Artificial Sequence
  Description of Artificial Sequence: Synthetic polynucleotide
atggctgccgatggttatcttccagattggctcgaggacaacctctctgagggcattcgcgagtggtgggcgctgaaacctggagccccgaagcccaaagccaaccagcaaaagcaggacgacggccggggtctggtgcttcctggctacaagtacctcggacccttcaacggactcgacaagggggagcccgtcaacgcggcggacgcggcggccctcgagcacgacaaggcctacgaccagcagctgcaggcgggtgacaatccgtacctgcggtataaccacgccgacgccgagtttcaggagcgtctgcaagaagatacgtcttttgggggcaacctcgggcgagcagtcttccaggccaagaagcgggttctcgaacctctcggtctggttgaggaaggcgctaagacggctcctggaaagaagagaccggtagagccatcaccccagcgttctccagactcctctacgggcatcggcaagaagggccaacagcccgccagaaaaagactcaattttggtcagactggcgactcagagtcagttccagaccctcaacctctcggagaacctccagcagcgccctctggtgtgggacctaatacaatggctgcaggcggtggcgcaccaatggcagacaataacgaaggcgccgacggagtgggtagttcctcgggaaattggcattgcgattccacatggctgggcgacagagtcatcaccaccagcacccgaacctgggccctgcccacctacaacaaccacctctacaagcaaatctccaacgggacatcgggaggagccaccaacgacaacacctacttcggctacagcaccccctgggggtattttgactttaacagattccactgccacttttcaccacgtgactggcagcgactcatcaacaacaactggggattccggcccaagagactcagcttcaagctcttcaacatccaggtcaaggaggtcacgcagaatgaaggcaccaagaccatcgccaataacctcaccagcaccatccaggtgtttacggactcggagtaccagctgccgtacgttctcggctctgcccaccagggctgcctgcctccgttcccggcggacgtgttcacgattccccagtacggctacctaacactcaacaacggtagtcaggccgtgggacgctcctccttctactgcctggaatactttccttcgcagatgctgagaaccggcaacaacttccagtttacttacaccttcgaggacgtgcctttccacagcagctacgcccacagccagagcttggaccggctgatgaatcctctgattgaccagtacctgtactacttgtctcggattcaaacaacaggaggcacggcaaatacgcagactctgggcttcagccaaggtgggcctaatacaatggccaatcaggcaaagaactggctgccaggaccctgttaccgccaacaacgcgtctcaacgacaaccgggcaaaacaacaatagcaactttgcctggactgctgggaccaaataccatctgaatggaagaaattcattggctaatcctggcatcgctatggcaacacacaaagacgacgaggagcgtttttttcccagtaacgggatcctgatttttggcaaacaaaatgctgccagagacaatgcggattacagcgatgtcatgcccaccagcgaggaagaaatcaaaaccactaaccctgtggccacagaggaatacggtatcgcggcagataacttgcagcagcaaaacacggctcctcaaattggaactgtcaacagccagggggccttacccggtatggtctggcagaaccgggacgtgtacctgcagggtcccatctgggccaagattcctcacacggacggcaacttccacccgtctccgctgatgggcggctttggcctgaaacatcctccgcctcagatcctgatcaagaacacgcctgtacctgcggatcctccgaccaccttcaaccagtcaaagctgaactctttcatcacgcaatacagcaccggacaggtcagcgtggaaattgaatgggagctgcagaaggaaaacagcaagcgctggaaccccgagatccagtacacctccaactactacaaatctacaagtgtggactttgctgttaatacagaaggcgtgtactctgaaccccgccccattggcacccgttacctcacccgtaatctgtaa

SEQ ID NO: 3838 - DNA, 2217 bp, Artificial Sequence
  Description of Artificial Sequence: Synthetic polynucleotide
atggctgccgatggttatcttccagattggctcgaggacaacctctctgagggcattcgcgagtggtgggcgctgaaacctggagccccgaagcccaaagccaaccagcaaaagcaggacgacggccggggtctggtgcttcctggctacaagtacctcggacccttcaacggactcgacaagggggagcccgtcaacgcggcggacgcggcggccctcgagcacgacaaggcctacgaccagcagctgcaggcgggtgacaatccgtacctgcggtataaccacgccgacgccgagtttcaggagcgtctgcaagaagatacgtcttttgggggcaacctcgggcgagcagtcttccaggccaagaagcgggttctcgaacctctcggtctggttgaggaaggcgctaagacggctcctggaaagaagagaccggtagagccatcaccccagcgttctccagactcctctacgggcatcggcaagaagggccaacagcccgccagaaaaagactcaattttggtcagactggcgactcagagtcagttccagaccctcaacctctcggagaacctccagcagcgccctctggtgtgggacctaatacaatggctgcaggcggtggcgcaccaatggcagacaataacgaaggcgccgacggagtgggtagttcctcgggaaattggcattgcgattccacatggctgggcgacagagtcatcaccaccagcacccgaacctgggccctgcccacctacaacaaccacctctacaagcaaatctccaacgggacatcgggaggagccaccaacgacaacacctacttcggctacagcaccccctgggggtattttgactttaacagattccactgccacttttcaccacgtgactggcagcgactcatcaacaacaactggggattccggcccaagagactcagcttcaagctcttcaacatccaggtcaaggaggtcacgcagaatgaaggcaccaagaccatcgccaataacctcaccagcaccatccaggtgtttacggactcggagtaccagctgccgtacgttctcggctctgcccaccagggctgcctgcctccgttcccggcggacgtgttcacgattccccagtacggctacctaacactcaacaacggtagtcaggccgtgggacgctcctccttctactgcctggaatactttccttcgcagatgctgagaaccggcaacaacttccagtttacttacaccttcgaggacgtgcctttccacagcagctacgcccacagccagagcttggaccggctgatgaatcctctgattgaccagtacctgtactacttgtctcggattcaaacaacaggaggcacggcaaatacgcagactctgggcttcagccaaggtgggcctaatacaatggccaatcaggcaaagaactggctgccaggaccctgttaccgccaacaacgcgtctcaacgacaaccgggcaaaacaacaatagcaactttgcctggactgctgggaccaaataccatctgaatggaagaaattcattggctaatcctggcatcgctatggcaacacacaaagacgacgaggagcgtttttttcccagtaacgggatcctgatttttggcaaacaaaatgctgccagagacaatgcggattacagcgatgtcatgcccaccagcgaggaagaaatcaaaaccactaaccctgtggccacagaggaatacggtatcgtggcagataacttgcagcagcaaaacacggctcctcaaattggaactgtcaacagccagggggccttacccggtatgatctggcagaaccgggacgtgtacctgcagggtcccatctgggccaagattcctcacacggacggcaacttccacccgtctccgctgatgggcggctttggcctgaaacatcctccgcctcagatcctgatcaagaacacgcctgtacctgcggatcctccgaccaccttcaaccagtcaaagctgaactctttcatcacgcaatacagcaccggacaggtcagcgtggaaattgaatgggagctgcagaaggaaaacagcaagcgctggaaccccgagatccagtacacctccaactactacaaatctacaagtgtggactttgctgttaatacagaaggcgtgtactctgaaccccgccccattggcacccgttacctcacccgtaatctgtaa

SEQ ID NO: 3839 - DNA, 2217 bp, Artificial Sequence
  Description of Artificial Sequence: Synthetic polynucleotide
atggctgccgatggttatcttccagattggctcgaggacaacctctctgagggcattcgcgagtggtgggcgctgaaacctggagccccgaagcccaaagccaaccagcaaaagcaggacgacggccggggtctggtgcttcctggctacaagtacctcggacccttcaacggactcgacaagggggagcccgtcaacgcggcggacgcggcggccctcgagcacgacaaggcctacgaccagcggctgcaggcgggtgacaatccgtacctgcggtataaccacgccgacgccgagtttcaggagcgtctgcaagaagatacgtcttttgggggcaacctcgggcgagcagtcttccaggccaagaagcgggttctcgaacctctcggtctggttgaggaaggcgctaagacggctcctggaaagaagagaccggtagagccatcaccccagcgttctccagactcctctacgggcatcggcaagaagggccaacagcccgccagaaaaagactcaattttggtcagactggcgactcagagtcagttccagaccctcaacctctcggagaacctccagcagcgccctctggtgtgggacctaatacaatggctgcaggcggtggcgcaccaatggcagacaataacgaaggcgccgacggagtgggtagttcctcgggaaattggcattgcgattccacatggctgggcgacagagtcatcaccaccagcacccgaacctgggccctgcccacctacaacaaccacctctacaagcaaatctccaacgggacatcgggaggagccaccaacgacaacacctacttcggctacagcaccccctgggggtattttgactttaacagattccactgccacttttcaccacgtgactggcagcgactcatcaacaacaactggggattccggcccaagagactcagcttcaagctcttcaacatccaggtcaaggaggtcacgcagaatgaaggcaccaagaccatcgccaataacctcaccagcaccatccaggtgtttacggactcggagtaccagctgccgtacgttctcggctctgcccaccagggctgcctgcctccgttcccggcggacgtgttcacgattccccagtacggctacctaacactcaacaacggtagtcaggccgtgggacgctcctccttctactgcctggaatactttccttcgcagatgctgagaaccggcaacaacttccagtttacttacaccttcgaggacgtgcctttccacagcagctacgcccacagccagagcttggaccggctgatgaatcctctgattgaccagtacctgtactacttgtctcggattcaaacaacaggaggcacggcaaatacgcagactctgggcttcagccaaggtgggcctaatacaatggccaatcaggcaaagaactggctgccaggaccctgttaccgccaacaacgcgtctcaacgacaaccgggcaaaacaacaatagcaactttgcctggactgctgggaccaaataccatctgaatggaagaaattcattggctaatcctggcatcgctatggcaacacacaaagacgacgaggagcgtttttttcccagtaacgggatcctgatttttggcaaacaaaatgctgccagagacaatgcggattacagcgatgtcatgcccaccagcgaggaagaaatcaaaaccactaaccctgtggccacagaggaatacggtatcgtggcagataacttgcagcagcaaaacacggctcctcaaattggaactgtcaacagccagggggccttacccggtatggtctggcagaaccgggacgtgtacctgcagggtcccatctgggccaagattcctcacacggacggcaacttccacccgtctccgctgatgggcggctttggcctgaaacatcctccgcctcagatcctgatcaagaacacgcctgtacctgcggatcctccgaccaccttcaaccagtcaaagctgaactctttcatcacgcaatacagcaccggacaggtcagcgtggaaattgaatgggagctgcagaaggaaaacagcaagcgctggaaccccgagatccagtacacctccaactactacaaatctacaagtgtggactttgctgttaatacagaaggcgtgtactctgaaccccgccccattggcacccgttacctcacccgtaatctgtaa

SEQ ID NO: 3840 - DNA, 2217 bp, Artificial Sequence
  Description of Artificial Sequence: Synthetic polynucleotide
atggctgccgatggttatcttccagattggctcgaggacaacctctctgagggcattcgcgagtggtgggcgctgaaacctggagccccgaagcccaaagccaaccagcaaaagcaggacgacggccggggtctggtgcttcctggctacaagtacctcggacccttcaacggactcgacaagggggagcccgtcaacgcggcggacgcggcggccctcgagcacgacaaggcctacgaccagcagctgcaggcgggtgacaatccgtacctgcggtataaccacgccgacgccgagtttcaggagcgtctgcaagaagatacgtcttttgggggcaacctcgggcgagcagtcttccaggccaagaagcgggttctcgaacctctcggtctggttgaggaaggcgctaagacggctcctggaaagaagagaccggtagagccatcaccccagcgttctccagactcctctacgggcatcggcaagaagggccaacagcccgccagaaaaagactcaattttggtcagactggcgactcagagtcagttccagaccctcaacctctcggagaacctccagcagcgccctctggtgtgggacctaatacaatggctgcaggcggtggcgcaccaatggcagacaataacgaaggcgccgacggagtgggtagttcctcgggaaattggcattgcgattccacatggctgggcgacagagtcatcaccaccagcacccgaacctgggccctgcccacctacaacaaccacctctacaagcaaatctccaacgggacatcgggaggagccaccaacgacaacacctacttcggctacagcaccccctgggggtattttgactttaacagattccactgccacttttcaccacgtgactggcagcgactcatcaacaacaactggggattccggcccaagagactcagcttcaagctcttcaacatccaggtcaaggaggtcacgcagaatgaaggcaccaagaccatcgccaataacctcaccagcaccatccaggtgtttacggactcggagtaccagctgccgtacgttctcggctctgcccaccagggctgcctgcctccgttcccggcggacgtgttcacgattccccagtacggctacctaacactcaacaacggtagtcaggccgtgggacgctcctccttctactgcctggaatactttccttcgcagatgctgagaaccggcaacaacttccagtttacttacaccttcgaggacgtgcctttccacagcagctacgcccacagccagagcttggaccggctgatgaatcctctgattgaccagtacctgtactacttgtctcggattcaaacaacaggaggcacggcaaatacgcagactctgggcttcagccaaggtgggcctaatacaatggccaatcaggcaaagaactggctgccaggaccctgttaccgccaacaacgcgtctcaacgacaaccgggcaaaacaacaatagcaactttgcctggactgctgggaccaaataccatctgaatggaagaaattcattggctaatcctggcatcgctatggcaacacacaaagacgacgaggagcgtttttttcccagtaacgggatcctgatttttggcaaacaaaatgctgccagagacaatgcggattacagcgatgtcatgcccaccagcgaggaagaaatcaaaaccactaaccctgtggccacagaggaatacggtatcgtggcagataacttgcagcagcaaaacacggctcctcaaattggaactgtcaacggccagggggccttacccggtatggtctggcagaaccgggacgtgtacctgcagggtcccatctgggccaagattcctcacacggacggcaacttccacccgtctccgctgatgggcggctttggcctgaaacatcctccgcctcagatcctgatcaagaacacgcctgtacctgcggatcctccgaccaccttcaaccagtcaaagctgaactctttcatcacgcaatacagcaccggacaggtcagcgtggaaattgaatgggagctgcagaaggaaaacagcaagcgctggaaccccgagatccagtacacctccaactactacaaatctacaagtgtggactttgctgttaatacagaaggcgtgtactctgaaccccgccccattggcacccgttacctcacccgtaatctgtaa

SEQ ID NO: 3841 - DNA, 2217 bp, Artificial Sequence
  Description of Artificial Sequence: Synthetic polynucleotide
atggctgccgatggttatcttccagattggctcgaggacaacctctctgagggcattcgcgagtggtgggcgctgaaacctggagccccgaagcccaaagccaaccagcaaaagcaggacgacggccggggtctggtgcttcctggctacaagtacctcggacccttcaacggactcgacaagggggagcccgtcaacgcggcggacgcggcggccctcgagcacgacaaggcctacgaccagcagctgcaggcgggtgacaatccgtacctgcggtataaccacgccgacgccgagtttcaggagcgtctgcaagaagatacgtcttttgggggcaacctcgggcgagcagtcttccaggccaagaagcgggttctcgaacctctcggtctggttgaggaaggcgctaagacggctcctggaaagaagagaccggtagagccatcaccccagcgttctccagactcctctacgggcatcggcaagaagggccaacagcccgccagaaaaagactcaattttggtcagactggcgactcagagtcagttccagaccctcaacctctcggagaacctccagcagcgccctctggtgtgggacctaatacaatggctgcaggcggtggcgcaccaatggcagacaataacgaaggcgccgacggagtgggtagttcctcgggaaattggcattgcgattccacatggctgggcgacagagtcatcaccaccagcacccgaacctgggccctgcccacctacaacaaccacctctacaagcaaatctccaacgggacatcgggaggagccaccaacgacaacacctacttcggctacagcaccccctgggggtattttgactttaacagattccactgccacttttcaccacgtgactggcagcgactcatcaacaacaactggggattccggcccaagagactcagcttcaagctcttcaacatccaggtcaaggaggtcacgcagaatgaaggcaccaagaccatcgccaataacctcaccagcaccatccaggtgtttacggactcggagtaccagctgccgtacgttctcggctctgcccaccagggctgcctgcctccgttcccggcggacgtgttcacgattccccagtacggctacctaacactcaacaacggtagtcaggccgtgggacgctcctccttctactgcctggaatactttccttcgcagatgctgagaaccggcaacaacttccagtttacttacaccttcgaggacgtgcctttccacagcagctacgcccacagccagagcttggaccggctgatgaatcctctgattgaccagtacctgtactacttgtctcggattcaaacaacaggaggcacggcaaatacgcagactctgggcttcagccaaggtgggcctaatacaatggccaatcaggcaaagaactggctgccaggaccctgttaccgccaacaacgcgtctcaacgacaaccgggcaaaacaacaatagcaactttgcctggactgctgggaccaaataccatctgaatggaagaaattcattggctaatcctggcatcgctatggcaacacacaaagacgacgaggagtgtttttttcccagtaacgggatcctgatttttggcaaacaaaatgctgccagagacaatgcggattacagcgatgtcatgcccaccagcgaggaagaaatcaaaaccactaaccctgtggccacagaggaatacggtatcgtggcagataacttgcagcagcaaaacacggctcctcaaattggaactgtcaacagccagggggccttacccggtatggtctggcagaaccgggacgtgtacctgcagggtcccatctgggccaagattcctcacacggacggcaacttccacccgtctccgctgatgggcggctttggcctgaaacatcctccgcctcagatcctgatcaagaacacgcctgtacctgcggatcctccgaccaccttcaaccagtcaaagctgaactctttcatcacgcaatacagcaccggacaggtcagcgtggaaattgaatgggagctgcagaaggaaaacagcaagcgctggaaccccgagatccagtacacctccaactactacaaatctacaagtgtggactttgctgttaatacagaaggcgtgtactctgaaccccgccccattggcacccgttacctcacccgtaatctgtaa

SEQ ID NO: 3842 - DNA, 2217 bp, Artificial Sequence
  Description of Artificial Sequence: Synthetic polynucleotide
atggctgccgatggttatcttccagattggctcgaggacaacctctctgagggcattcgcgagtggtgggcgctgaaacctggagccccgaagcccaaagccaaccagcaaaagcaggacgacggccggggtctggtgcttcctggctacaagtacctcggacccttcaacggactcgacaagggggagcccgtcaacgcggcggacgcggcggccctcgagcacgacaaggcctacgaccagcagctgcaggcgggtgacaatccgtacctgcggtataaccacgccgacgccgagtttcaggagcgtctgcaagaagatacgtcttttgggggcaacctcgggcgagcagtcttccaggccaagaagcgggttctcgaacctctcggtctggttgaggaaggcgctaagacggctcctggaaagaagagaccggtagagccatcaccccagcgttctccagactcctctacgggcatcggcaagaagggccaacagcccgccagaaaaagactcaattttggtcagactggcgactcagagtcagttccagaccctcaacctctcggagaacctccagcagcgccctctggtgtgggacctaatacaatggctgcaggcggtggcgcaccaatggcagacaataacgaaggcgccgacggagtgggtagttcctcgggaaattggcattgcgattccacatggctgggcgacagagtcatcaccaccagcacccgaacctgggccctgcccacctacaacaaccacctctacaagcaaatctccaacgggacatcgggaggagccaccaacgacaacacctacttcggctacagcaccccctgggggtattttgactttaacagattccactgccacttttcaccacgtgactggcagcgactcatcaacaacaactggggattccggcccaagagactcagcttcaagctcttcaacatccaggtcaaggaggtcacgcagaatgaaggcaccaagaccatcgccaataacctcaccagcaccatccaggtgtttacggactcggagtaccagctgccgtacgttctcggctctgcccaccagggctgcctgcctccgttcccggcggacgtgttcacgattccccagtacggctacctaacactcaacaacggtagtcaggccgtgggacgctcctccttctactgcctggaatactttccttcgcagatgctgagaaccggcaacaacttccagtttacttacaccttcgaggacgtgcctttccacagcagctacgcccacagccagagcttggaccggctgatgaatcctctgattgaccagtacctgtactacttgtctcggattcaaacaacaggaggcacggcaaatacgcagactctgggcttcagccaaggtgggcctaatacaatggccaatcaggcaaagaactggctgccaggaccctgttaccgccaacaacgcgtctcaacgacaaccgggcaaaacaacaatagcaactttgcctggactgctgggaccaaataccatctgaatggaagaaattcattggctaatcctggcatcgctatggcaacacacaaagacgacgaggagcgtttttttcccagtaacgggatcctgatttttggcaaacaaaatgctgccagagacaatgcggattacagcgatgtcatgcccaccagcgaggaagaaatcaaaaccactaaccctgtggccacagaggaatacggtatcgtggcagataacttgcagcagcaaaacacggctcctcaaattggaactgtcaacagccagggggccttacccggtatggtctggcagaaccgggacgcgtacctgcagggtcccatctgggccaagattcctcacacggacggcaacttccacccgtctccgctgatgggcggctttggcctgaaacatcctccgcctcagatcctgatcaagaacacgcctgtacctgcggatcctccgaccaccttcaaccagtcaaagctgaactctttcatcacgcaatacagcaccggacaggtcagcgtggaaattgaatgggagctgcagaaggaaaacagcaagcgctggaaccccgagatccagtacacctccaactactacaaatctacaagtgtggactttgctgttaatacagaaggcgtgtactctgaaccccgccccattggcacccgttacctcacccgtaatctgtaa

SEQ ID NO: 3843 - DNA, 2217 bp, Artificial Sequence
  Description of Artificial Sequence: Synthetic polynucleotide
atggctgccgatggttatcttccagattggctcgaggacaacctctctgagggcattcgcgagtggtgggcgctgaaacctggagccccgaagcccaaagccaaccagcaaaagcaggacgacggccggggtctggtgcttcctggctacaagtacctcggacccttcaacggactcgacaagggggagcccgtcaacgcggcggacgcggcggccctcgagcacgacaaggcctacgaccagcagctgcaggcgggtgacaatccgtacctgcggtataaccacgccgacgccgagtttcaggagcgtctgcaagaagatacgtcttttgggggcaacctcgggcgagcagtcttccaggccaagaagcgggttctcgaacctctcggtctggttgaggaaggcgctaagacggctcctggaaagaagagaccggtagagccatcaccccagcgttctccagactcctctacgggcatcggcaagaagggccaacagcccgccagaaaaagactcaattttggtcagactggcgactcagagtcagttccagaccctcaacctctcggagaacctccagcagcgccctctggtgtgggacctaatacaatggctgcaggcggtggcgcaccaatggcagacaataacgaaggcgccgacggagtgggtagttcctcgggaaattggcattgcgattccacatggctgggcgacagagtcatcaccaccagcacccgaacctgggccctgcccacctacaacaaccacctctacaagcaaatctccaacgggacatcgggaggagccaccaacgacaacacctacttcggctacagcaccccctgggggtattttgactttaacagattccactgccacttttcaccacgtgactggcagcgactcatcaacaacaactggggattccggcccaagagactcagcttcaagctcttcaacatccaggtcaaggaggtcacgcagaatgaaggcaccaagaccatcgccaataacctcaccagcaccatccaggtgtttacggactcggagtaccagctgccgtacgttctcggctctgcccaccagggctgcctgcctccgttcccggcggacgtgttcacgattccccagtacggctacctaacactcaacaacggtagtcaggccgcgggacgctcctccttctactgcctggaatactttccttcgcagatgctgagaaccggcaacaacttccagtttacttacaccttcgaggacgtgcctttccacagcagctacgcccacagccagagcttggaccggctgatgaatcctctgattgaccagtacctgtactacttgtctcggattcaaacaacaggaggcacggcaaatacgcagactctgggcttcagccaaggtgggcctaatacaatggccaatcaggcaaagaactggctgccaggaccctgttaccgccaacaacgcgtctcaacgacaaccgggcaaaacaacaatagcaactttgcctggactgctgggaccaaataccatctgaatggaagaaattcattggctaatcctggcatcgctatggcaacacacaaagacgacgaggagcgtttttttcccagtaacgggatcctgatttttggcaaacaaaatgctgccagagacaatgcggattacagcgatgtcatgcccaccagcgaggaagaaatcaaaaccactaaccctgtggccacagaggaatacggtatcgtggcagataacttgcagcagcaaaacacggctcctcaaattggaactgtcaacagccagggggccttacccggtatggtctggcagaaccgggacgtgtacctgcagggtcccatctgggccaagattcctcacacggacggcaacttccacccgtctccgctgatgggcggctttggcctgaaacatcctccgcctcagatcctgatcaagaacacgcctgtacctgcggatcctccgaccaccttcaaccagtcaaagctgaactctttcatcacgcaatacagcaccggacaggtcagcgtggaaattgaatgggagctgcagaaggaaaacagcaagcgctggaaccccgagatccagtacacctccaactactacaaatctacaagtgtggactttgctgttaatacagaaggcgtgtactctgaaccccgccccattggcacccgttacctcacccgtaatctgtaa

SEQ ID NO: 3844 - DNA, 2217 bp, Artificial Sequence
  Description of Artificial Sequence: Synthetic polynucleotide
atggctgccgatggttatcttccagattggctcgaggacaacctctctgagggcattcgcgagtggtgggcgctgaaacctggagccccgaagcccaaagccaaccagcaaaagcaggacgacggccggggtctggtgcttcctggctacaagtacctcggacccttcaacggactcgacaagggggagcccgtcaacgcggcggacgcggcggccctcgagcacgacaaggcctacgaccagcagctgcaggcgggtgacaatccgtacctgcggtataaccacgccgacgccgagtttcaggagcgtctgcaagaagatacgtcttttgggggcaacctcgggcgagcagtcttccaggccaagaagcgggttctcgaacctctcggtctggttgaggaaggcgctaagacggctcctggaaagaagagaccggtagagccatcaccccagcgttctccagactcctctacgggcatcggcaagaagggccaacagcccgccagaaaaagactcaattttggtcagactggcgactcagagtcagttccagaccctcaacctctcggagaacctccagcagcgccctctggtgtgggacctaatacaatggctgcaggcggtggcgcaccaatggcagacaataacgaaggcgccgacggagtgggtagttcctcgggaaattggcattgcgattccacatggctgggcgacagagtcatcaccaccagcacccgaacctgggccctgcccacctacaacaaccacctctacaagcaaatctccaacgggacatcgggaggagccaccaacgacaacacctacttcggctacagcaccccctgggggtattttgactttaacagattccactgccacttttcaccacgtgactggcagcgactcatcaacaacaactggggattccggcccaagagactcagcttcaagctcttcaacatccaggtcaaggaggtcacgcagaatgaaggcaccaagaccatcgccaataacctcaccagcaccatccaggtgtttacggactcggagtaccagctgccgtacgttctcggctctgcccaccagggctgcctgcctccgttcccggcggacgtgttcacgattccccagtacggctacctaacactcaacaacggtagtcaggccgtgggacgctcctccttctactgcctggaatactttccttcgcagatgctgagaaccggcaacaacttccagtttacttacaccttcgaggacgtgcctttccacagcagctacgcccacagccagagcttggaccggctgatgaatcctctgattgaccagtacctgtactacttgtctcggattcaaacaacaggaggcacggcaaatacgcagactctgggcttcagccaaggtgggcctaatacaatggccaatcaggcaaagaactggctgccaggaccctgttaccgccaacaacgcgtctcaacgacaaccgggcaaaacaacaatagcaactttgcctggactgctgggaccaaataccatctgaatggaagaaattcattggctaatcctggcatcgctatggcaacacacaaagacgacgaggagcgtttttttcccagtaacgggatcctgatttttggcaaacaaaatgctgccagagacaatgcggattacagcgatgtcatgcccaccagcgaggaagaaatcaaaaccactaaccctgtggccacagaggaatacggtatcgtggcagataacttgcagcagcaaaacacggctcctcaaattggaactgtcaacagccagggggccttacccggtatggtctggcagaaccgggacgtgtacctgcagggtcccatctgggccaagattcctcacacggacggcaacttccacccgtctccgctgatgggcggctttggcctgaaacatcctccgcctcagatcctgatcaagaacacgcctgtacctgcggatcctccgaccaccttcaaccagtcaaagctgaactctttcatcacgcaatacagcaccggacaggtcagcgtggaaattgaatgggagctgcagaaggaaaacagcaagcgctggaaccccgagatccagtacacctccaactactacaaatctacaagtgtggaccttgctgttaatacagaaggcgtgtactctgaaccccgccccattggcacccgttacctcacccgtaatctgtaa

SEQ ID NO: 3845 - DNA, 2217 bp, Artificial Sequence
  Description of Artificial Sequence: Synthetic polynucleotide
atggctgccgatggttatcttccagattggctcgaggacaacctctctgagggcattcgcgagtggtgggcgctgaaacctggagccccgaagcccaaagccaaccagcaaaagcaggacgacggccggggtctggtgcttcctggctacaagtacctcggacccttcaacggactcgacaagggggagcccgtcaacgcggcggacgcggcggccctcgagcacgacaaggcctacgaccagcagctgcaggcgggtgacaatccgtacctgcggtataaccacgccgacgccgagtttcaggagcgtctgcaagaagatacgtcttttgggggcaacctcgggcgagcagtcttccaggccaagaagcgggttctcgaacctctcggtctggttgaggaaggcgctaagacggctcctggaaagaagagaccggtagagccatcaccccagcgttctccagactcctctacgggcatcggcaagaagggccaacagcccgccagaaaaagactcaattttggtcagactggcgactcagagtcagttccagaccctcaacctctcggagaacctccagcagcgccctctggtgtgggacctaatacaatggctgcaggcggtggcgcaccaatggcagacaataacgaaggcgccgacggagtgggtagttcctcgggaaattggcattgcgattccacatggctgggcgacagagtcatcaccaccagcacccgaacctgggccctgcccacctacaacaaccacctctacaagcaaatctccaacgggacatcgggaggagccaccaacgacaacacctacttcggctacagcaccccctgggggtattttgactttaacagattccactgccacttttcaccacgtgactggcagcgactcatcaacaacaactggggattccggcccaagagactcagcttcaagctcttcaacatccaggtcaaggaggtcacgcagaatgaaggcaccaagaccatcgccaataacctcaccagcaccatccaggtgtttacggactcggagtaccagctgccgtacgttctcggctctgcccaccagggctgcctgcctccgttcccggcggacgtgttcacgattccccagtacggctacctaacactcaacaacggtagtcaggccgtgggacgctcctccttctactgcctggaatactttccttcgcagatgctgagaaccggcaacaacttccagtttacttacaccttcgaggacgtgcctttccacagcagctacgcccacagccagagcttggaccggctgatgaatcctctgattgaccagtacctgtactacttgtctcggattcaaacaacaggaggcacggcaaatacgcagactctgggcttcagccaaggtgggcctaatacaatggccaatcaggcaaagaactggctgccaggaccctgttaccgccaacaacgcgtctcaacgacaaccgggcaaaacaacaatagcaactttgcctggactgctgggaccaaataccatctgaatggaagaaattcattggctaatcctggcatcgctatggcaacacacaaagacgacgaggagcgtttttttcccagtaacgggatcctgatttttggcaaacaaaatgctgccagagacaatgcggattacagcgatgtcatgcccaccagcgaggaagaaatcaaaaccactaaccctgtggccacagaggaatacggtatcgtggcagataacttgcagcagcaaaacacggctcctcaaattggaactgtcaacagccagggggccttacccggtatggtctggcagaaccgggacgtgtacctgcagggtcccatctgggccaagattcctcacacggacggcaacttccacccgtctccgctgatgggcggctttggcctgaaacatcctccgcctcagatcctgatcaagaacacgcctgtacctgcggatcctccgaccaccttcaaccagtcaaagctgaactctttcatcacgcaatacagcaccggacaggtcagcgtggaaattgaatgggagccgcagaaggaaaacagcaagcgctggaaccccgagatccagtacacctccaactactacaaatctacaagtgtggactttgctgttaatacagaaggcgtgtactctgaaccccgccccattggcacccgttacctcacccgtaatctgtaa

SEQ ID NO: 3846 - DNA, 2217 bp, Artificial Sequence
  Description of Artificial Sequence: Synthetic polynucleotide
atggctgccgatggttatcttccagattggctcgaggacaacctctctgagggcattcgcgagtggtgggcgctgaaacctggagccccgaagcccaaagccaaccagcaaaagcaggacgacggccggggtctggtgcttcctggctacaagtacctcggacccttcaacggactcgacaagggggagcccgtcaacgcggcggacgcggcggccctcgagcacgacaaggcctacgaccagcagctgcaggcgggtgacaatccgtacctgcggtataaccacgccgacgccgagtttcaggagcgtctgcaagaagatacgtcttttgggggcaacctcgggcgagcagtcttccaggccaagaagcgggttctcgaacctctcggtctggttgaggaaggcgctaagacggctcctggaaagaagagaccggtagagccatcaccccagcgttctccagactcctctacgggcatcggcaagaagggccaacagcccgccagaaaaagactcaattttggtcagactggcgactcagagtcagttccagaccctcaacctctcggagaacctccagcagcgccctctggtgtgggacctaatacaatggctgcaggcggtggcgcaccaatggcagacaataacgaaggcgccgacggagtgggtagttcctcgggaaattggcattgcgattccacatggctgggcgacagagtcatcaccaccagcacccgaacctgggccctgcccacctacaacaaccacctctacaagcaaatctccaacgggacatcgggaggagccaccaacgacaacacctacttcggctacagcaccccctgggggtattttgactttaacagattccactgccacttttcaccacgtgactggcagcgacccatcaacaacaactggggattccggcccaagagactcagcttcaagctcttcaacatccaggtcaaggaggtcacgcagaatgaaggcaccaagaccatcgccaataacctcaccagcaccatccaggtgtttacggactcggagtaccagctgccgtacgttctcggctctgcccaccagggctgcctgcctccgttcccggcggacgtgttcacgattccccagtacggctacctaacactcaacaacggtagtcaggccgtgggacgctcctccttctactgcctggaatactttccttcgcagatgctgagaaccggcaacaacttccagtttacttacaccttcgaggacgtgcctttccacagcagctacgcccacagccagagcttggaccggctgatgaatcctctgattgaccagtacctgtactacttgtctcggattcaaacaacaggaggcacggcaaatacgcagactctgggcttcagccaaggtgggcctaatacaatggccaatcaggcaaagaactggctgccaggaccctgttaccgccaacaacgcgtctcaacgacaaccgggcaaaacaacaatagcaactttgcctggactgctgggaccaaataccatctgaatggaagaaattcattggctaatcctggcatcgctatggcaacacacaaagacgacgaggagcgtttttttcccagtaacgggatcctgatttttggcaaacaaaatgctgccagagacaatgcggattacagcgatgtcatgcccaccagcgaggaagaaatcaaaaccactaaccctgtggccacagaggaatacggtatcgtggcagataacttgcagcagcaaaacacggctcctcaaattggaactgtcaacagccagggggccttacccggtatggtctggcagaaccgggacgtgtacctgcagggtcccatctgggccaagattcctcacacggacggcaacttccacccgtctccgctgatgggcggctttggcctgaaacatcctccgcctcagatcctgatcaagaacacgcctgtacctgcggatcctccgaccaccttcaaccagtcaaagctgaactctttcatcacgcaatacagcaccggacaggtcagcgtggaaattgaatgggagctgcagaaggaaaacagcaagcgctggaaccccgagatccagtacacctccaactactacaaatctacaagtgtggactttgctgttaatacagaaggcgtgtactctgaaccccgccccattggcacccgttacctcacccgtaatctgtaa

SEQ ID NO: 3847 - DNA, 2217 bp, Artificial Sequence
  Description of Artificial Sequence: Synthetic polynucleotide
atggctgccgatggttatcttccagattggctcgaggacaacctctctgagggcattcgcgagtggtgggcgctgaaacctggagccccgaagcccaaagccaaccagcaaaagcaggacgacggccggggtctggtgcttcctggctacaagtacctcggacccttcaacggactcgacaagggggagcccgtcaacgcggcggacgcggcggccctcgagcacgacaaggcctacgaccagcagctgcaggcgggtgacaatccgtacctgcggtataaccacgccgacgccgagtttcaggagcgtctgcaagaagatacgtcttttgggggcaacctcgggcgagcagtcttccaggccaagaagcgggttctcgaacctctcggtctggttgaggaaggcgctaagacggctcctggaaagaagagaccggtagagccatcaccccagcgttctccagactcctctacgggcatcggcaagaagggccaacagcccgccagaaaaagactcaattttggtcagactggcgactcagagtcagttccagaccctcaacctctcggagaacctccagcagcgccctctggtgtgggacctaatacaatggctgcaggcggtggcgcaccaatggcagacaataacgaaggcgccgacggagtgggtagttcctcgggaaattggcattgcgattccacatggctgggcgacagagtcatcaccaccagcacccgaacctgggccctgcccacctacaacaaccacctctacaagcaaatctccaacgggacatcgggaggagccaccaacgacaacacctacttcggctacagcaccccctgggggtattttgactttaacagattccactgccacttttcaccacgtgactggcagcgactcatcaacaacaactggggattccggcccaagagactcagcttcaagctcttcaacatccaggtcaaggaggtcacgcagaatgaaggcaccaagaccatcgccaataacctcaccagcaccatccaggtgtttacggactcggagtaccagctgccgtacgttctcggctctgcccaccagggctgcctgcctccgttcccggcggacgtgttcacgattccccagtacggctacctaacactcaacaacggtagtcaggccgtgggacgctcctccttctactgcctggaatactttccttcgcagatgctgagaaccggcaacaacttccagtttacttacaccttcgaggacgtgcctttccacagcagctacgcccacagccagagcttggaccggctgatgaatcctctgattgaccagtacctgtactacttgtctcggattcaaacaacaggaggcacggcaaatacgcagactctgggcttcagccaaggtgggcctaatacaatggccaatcaggcaaagaactggctgccaggaccctgttaccgccaacaacgcgtctcaacgacaaccgggcaaaacaacaatagcaactttgcctggactgctgggaccaaataccatctgaatggaagaaattcattggctaatcctggcatcgctatggcaacacacaaagacgacgaggagcgtttttttcccagtaacgggatcctgatttttggcaaacaaaatgctgccagagacaatgcggattacagcgatgtcatgcccaccagcgaggaagaaatcaaaaccactaaccctgcggccacagaggaatacggtatcgtggcagataacttgcagcagcaaaacacggctcctcaaattggaactgtcaacagccagggggccttacccggtatggtctggcagaaccgggacgtgtacctgcagggtcccatctgggccaagattcctcacacggacggcaacttccacccgtctccgctgatgggcggctttggcctgaaacatcctccgcctcagatcctgatcaagaacacgcctgtacctgcggatcctccgaccaccttcaaccagtcaaagctgaactctttcatcacgcaatacagcaccggacaggtcagcgtggaaattgaatgggagctgcagaaggaaaacagcaagcgctggaaccccgagatccagtacacctccaactactacaaatctacaagtgtggactttgctgttaatacagaaggcgtgtactctgaaccccgccccattggcacccgttacctcacccgtaatctgtaa

SEQ ID NO: 3848 - DNA, 2217 bp, Artificial Sequence
  Description of Artificial Sequence: Synthetic polynucleotide
atggctgccgatggttatcttccagattggctcgaggacaacctctctgagggcattcgcgagtggtgggcgctgaaacctggagccccgaagcccaaagccaaccagcaaaagcaggacgacggccggggtctggtgcttcctggctacaagtacctcggacccttcaacggactcgacaagggggagcccgtcaacgcggcggacgcggcggccctcgagcacgacaaggcctacgaccagcagctgcaggcgggtgacaatccgtacctgcggtataaccacgccgacgccgagtttcaggagcgtctgcaagaagatacgtcttttgggggcaacctcgggcgagcagtcttccaggccaagaagcgggttctcgaacctctcggtctggttgaggaaggcgctaagacggctcctggaaagaagagaccggtagagccatcaccccagcgttctccagactcctctacgggcatcggcaagaagggccaacagcccgccagaaaaagactcaattttggtcagactggcgactcagagtcagttccagaccctcaacctctcggagaacctccagcagcgccctctggtgtgggacctaatacaatggctgcaggcggtggcgcaccaatggcagacaataacgaaggcgccgacggagtgggtagttcctcgggaaattggcattgcgattccacatggctgggcgacagagtcatcaccaccagcacccgaacctgggccctgcccacctacaacaaccacctctacaagcaaatctccaacgggacatcgggaggagccaccaacgacaacacctacttcggctacagcaccccctgggggtattttgactttaacagattccactgccacttttcaccacgtgactggcagcgactcatcaacaacaactggggattccggcccaagagactcagcttcaagctcttcaacatccaggtcaaggaggtcacgcagaatgaaggcaccaagaccatcgccaataacctcaccagcaccatccaggtgtttacggactcggagtaccagctgccgtacgttctcggctctgcccaccagggctgcctgcctccgttcccggcggacgtgttcacgattccccagtacgactacctaacactcaacaacggtagtcaggccgtgggacgctcctccttctactgcctggaatactttccttcgcagatgctgagaaccggcaacaacttccagtttacttacaccttcgaggacgtgcctttccacagcagctacgcccacagccagagcttggaccggctgatgaatcctctgattgaccagtacctgtactacttgtctcggattcaaacaacaggaggcacggcaaatacgcagactctgggcttcagccaaggtgggcctaatacaatggccaatcaggcaaagaactggctgccaggaccctgttaccgccaacaacgcgtctcaacgacaaccgggcaaaacaacaatagcaactttgcctggactgctgggaccaaataccatctgaatggaagaaattcattggctaatcctggcatcgctatggcaacacacaaagacgacgaggagcgtttttttcccagtaacgggatcctgatttttggcaaacaaaatgctgccagagacaatgcggattacagcgatgtcatgcccaccagcgaggaagaaatcaaaaccactaaccctgtggccacagaggaatacggtatcgtggcagataacttgcagcagcaaaacacggctcctcaaattggaactgtcaacagccagggggccttacccggtatggtctggcagaaccgggacgtgtacctgcagggtcccatctgggccaagattcctcacacggacggcaacttccacccgtctccgctgatgggcggctttggcctgaaacatcctccgcctcagatcctgatcaagaacacgcctgtacctgcggatcctccgaccaccttcaaccagtcaaagctgaactctttcatcacgcaatacagcaccggacaggtcagcgtggaaattgaatgggagctgcagaaggaaaacagcaagcgctggaaccccgagatccagtacacctccaactactacaaatctacaagtgtggactttgctgttaatacagaaggcgtgtactctgaaccccgccccattggcacccgttacctcacccgtaatctgtaa

SEQ ID NO: 3849 - DNA, 2217 bp, Artificial Sequence
  Description of Artificial Sequence: Synthetic polynucleotide
atggctgccgatggttatcttccagattggctcgaggacaacctctctgagggcattcgcgagtggtgggcgctgaaacctggagccccgaagcccaaagccaaccagcaaaagcaggacgacggccggggtctggtgcttcctggctacaagtacctcggacccttcaacggactcgacaagggggagcccgtcaacgcggcggacgcggcggccctcgagcacgacaaggcctacgaccagcagctgcaggcgggtgacaatccgtacctgcggtataaccacgccgacgccgagtttcaggagcgtctgcaagaagatacgtcttttgggggcaacctcgggcgagcagtcttccaggccaagaagcgggttctcgaacctctcggtctggttgaggaaggcgctaagacggctcctggaaagaagagaccggtagagccatcaccccagcgttctccagactcctctacgggcatcggcaagaagggccaacagcccgccagaaaaagactcaattttggtcagactggcgactcagggtcagttccagaccctcaacctctcggagaacctccagcagcgccctctggtgtgggacctaatacaatggctgcaggcggtggcgcaccaatggcagacaataacgaaggcgccgacggagtgggtagttcctcgggaaattggcattgcgattccacatggctgggcgacagagtcatcaccaccagcacccgaacctgggccctgcccacctacaacaaccacctctacaagcaaatctccaacgggacatcgggaggagccaccaacgacaacacctacttcggctacagcaccccctgggggtattttgactttaacagattccactgccacttttcaccacgtgactggcagcgactcatcaacaacaactggggattccggcccaagagactcagcttcaagctcttcaacatccaggtcaaggaggtcacgcagaatgaaggcaccaagaccatcgccaataacctcaccagcaccatccaggtgtttacggactcggagtaccagctgccgtacgttctcggctctgcccaccagggctgcctgcctccgttcccggcggacgtgttcacgattccccagtacggctacctaacactcaacaacggtagtcaggccgtgggacgctcctccttctactgcctggaatactttccttcgcagatgctgagaaccggcaacaacttccagtttacttacaccttcgaggacgtgcctttccacagcagctacgcccacagccagagcttggaccggctgatgaatcctctgattgaccagtacctgtactacttgtctcggattcaaacaacaggaggcacggcaaatacgcagactctgggcttcagccaaggtgggcctaatacaatggccaatcaggcaaagaactggctgccaggaccctgttaccgccaacaacgcgtctcaacgacaaccgggcaaaacaacaatagcaactttgcctggactgctgggaccaaataccatctgaatggaagaaattcattggctaatcctggcatcgctatggcaacacacaaagacgacgaggagcgtttttttcccagtaacgggatcctgatttttggcaaacaaaatgctgccagagacaatgcggattacagcgatgtcatgcccaccagcgaggaagaaatcaaaaccactaaccctgtggccacagaggaatacggtatcgtggcagataacttgcagcagcaaaacacggctcctcaaattggaactgtcaacagccagggggccttacccggtatggtctggcagaaccgggacgtgtacctgcagggtcccatctgggccaagattcctcacacggacggcaacttccacccgtctccgctgatgggcggctttggcctgaaacatcctccgcctcagatcctgatcaagaacacgcctgtacctgcggatcctccgaccaccttcaaccagtcaaagctgaactctttcatcacgcaatacagcaccggacaggtcagcgtggaaattgaatgggagctgcagaaggaaaacagcaagcgctggaaccccgagatccagtacacctccaactactacaaatctacaagtgtggactttgctgttaatacagaaggcgtgtactctgaaccccgccccattggcacccgttacctcacccgtaatctgtaa

SEQ ID NO: 3850 - DNA, 2217 bp, Artificial Sequence
  Description of Artificial Sequence: Synthetic polynucleotide
atggctgccgatggttatcttccagattggctcgaggacaacctctctgagggcattcgcgagtggtgggcgctgaaacctggagccccgaagcccaaagccaaccagcaaaagcaggacgacggccggggtctggtgcttcctggctacaagtacctcggacccttcaacggactcgacaagggggagcccgtcaacgcggcggacgcggcggccctcgagcacgacaaggcctacgaccagcagctgcaggcgggtgacaatccgtacctgcggtataaccacgccgacgccgagtttcaggagcgtctgcaagaagatacgtcttttgggggcaacctcgggcgagcagtcttccaggccaagaagcgggttctcgaacctctcggtctggttgaggaaggcgctaagacggctcctggaaagaagagaccggtagagccatcaccccagcgttctccagactcctctacgggcatcggcaagaagggccaacagcccgccagaaaaagactcaattttggtcagactggcgactcagagtcagttccagaccctcaacctctcggagaacctccagcagcgccctctggtgtgggacctaatacaatggctgcaggcggtggcgcaccaatggcagacaataacgaaggcgccgacggagtgggtagttcctcgggaaattggcattgcgattccacatggctgggcgacagagtcatcaccaccagcacccgaacctgggccctgcccacctacaacaaccacctctacaagcaaatctccaacgggacatcgggaggagccaccaacgacaacacctacttcggctacagcaccccctgggggtattttgactttaacagattccactgccacttttcaccacgtgactggcagcgactcatcaacaacaactggggattccggcccaagagactcagcttcaagctcttcaacatccaggtcaaggaggtcacgcagaatgaaggcaccaaggccatcgccaataacctcaccagcaccatccaggtgtttacggactcggagtaccagctgccgtacgttctcggctctgcccaccagggctgcctgcctccgttcccggcggacgtgttcacgattccccagtacggctacctaacactcaacaacggtagtcaggccgtgggacgctcctccttctactgcctggaatactttccttcgcagatgctgagaaccggcaacaacttccagtttacttacaccttcgaggacgtgcctttccacagcagctacgcccacagccagagcttggaccggctgatgaatcctctgattgaccagtacctgtactacttgtctcggattcaaacaacaggaggcacggcaaatacgcagactctgggcttcagccaaggtgggcctaatacaatggccaatcaggcaaagaactggctgccaggaccctgttaccgccaacaacgcgtctcaacgacaaccgggcaaaacaacaatagcaactttgcctggactgctgggaccaaataccatctgaatggaagaaattcattggctaatcctggcatcgctatggcaacacacaaagacgacgaggagcgtttttttcccagtaacgggatcctgatttttggcaaacaaaatgctgccagagacaatgcggattacagcgatgtcatgcccaccagcgaggaagaaatcaaaaccactaaccctgtggccacagaggaatacggtatcgtggcagataacttgcagcagcaaaacacggctcctcaaattggaactgtcaacagccagggggccttacccggtatggtctggcagaaccgggacgtgtacctgcagggtcccatctgggccaagattcctcacacggacggcaacttccacccgtctccgctgatgggcggctttggcctgaaacatcctccgcctcagatcctgatcaagaacacgcctgtacctgcggatcctccgaccaccttcaaccagtcaaagctgaactctttcatcacgcaatacagcaccggacaggtcagcgtggaaattgaatgggagctgcagaaggaaaacagcaagcgctggaaccccgagatccagtacacctccaactactacaaatctacaagtgtggactttgctgttaatacagaaggcgtgtactctgaaccccgccccattggcacccgttacctcacccgtaatctgtaa

SEQ ID NO: 3851 - DNA, 2217 bp, Artificial Sequence
  Description of Artificial Sequence: Synthetic polynucleotide
atggctgccgatggttatcttccagattggctcgaggacaacctctctgagggcattcgcgagtggtgggcgctgaaacctggagccccgaagcccaaagccaaccagcaaaagcaggacgacggccggggtccggtgcttcctggctacaagtacctcggacccttcaacggactcgacaagggggagcccgtcaacgcggcggacgcggcggccctcgagcacgacaaggcctacgaccagcagctgcaggcgggtgacaatccgtacctgcggtataaccacgccgacgccgagtttcaggagcgtctgcaagaagatacgtcttttgggggcaacctcgggcgagcagtcttccaggccaagaagcgggttctcgaacctctcggtctggttgaggaaggcgctaagacggctcctggaaagaagagaccggtagagccatcaccccagcgttctccagactcctctacgggcatcggcaagaagggccaacagcccgccagaaaaagactcaattttggtcagactggcgactcagagtcagttccagaccctcaacctctcggagaacctccagcagcgccctctggtgtgggacctaatacaatggctgcaggcggtggcgcaccaatggcagacaataacgaaggcgccgacggagtgggtagttcctcgggaaattggcattgcgattccacatggctgggcgacagagtcatcaccaccagcacccgaacctgggccctgcccacctacaacaaccacctctacaagcaaatctccaacgggacatcgggaggagccaccaacgacaacacctacttcggctacagcaccccctgggggtattttgactttaacagattccactgccacttttcaccacgtgactggcagcgactcatcaacaacaactggggattccggcccaagagactcagcttcaagctcttcaacatccaggtcaaggaggtcacgcagaatgaaggcaccaagaccatcgccaataacctcaccagcaccatccaggtgtttacggactcggagtaccagctgccgtacgttctcggctctgcccaccagggctgcctgcctccgttcccggcggacgtgttcacgattccccagtacggctacctaacactcaacaacggtagtcaggccgtgggacgctcctccttctactgcctggaatactttccttcgcagatgctgagaaccggcaacaacttccagtttacttacaccttcgaggacgtgcctttccacagcagctacgcccacagccagagcttggaccggctgatgaatcctctgattgaccagtacctgtactacttgtctcggattcaaacaacaggaggcacggcaaatacgcagactctgggcttcagccaaggtgggcctaatacaatggccaatcaggcaaagaactggctgccaggaccctgttaccgccaacaacgcgtctcaacgacaaccgggcaaaacaacaatagcaactttgcctggactgctgggaccaaataccatctgaatggaagaaattcattggctaatcctggcatcgctatggcaacacacaaagacgacgaggagcgtttttttcccagtaacgggatcctgatttttggcaaacaaaatgctgccagagacaatgcggattacagcgatgtcatgcccaccagcgaggaagaaatcaaaaccactaaccctgtggccacagaggaatacggtatcgtggcagataacttgcagcagcaaaacacggctcctcaaattggaactgtcaacagccagggggccttacccggtatggtctggcagaaccgggacgtgtacctgcagggtcccatctgggccaagattcctcacacggacggcaacttccacccgtctccgctgatgggcggctttggcctgaaacatcctccgcctcagatcctgatcaagaacacgcctgtacctgcggatcctccgaccaccttcaaccagtcaaagctgaactctttcatcacgcaatacagcaccggacaggtcagcgtggaaattgaatgggagctgcagaaggaaaacagcaagcgctggaaccccgagatccagtacacctccaactactacaaatctacaagtgtggactttgctgttaatacagaaggcgtgtactctgaaccccgccccattggcacccgttacctcacccgtaatctgtaa

SEQ ID NO: 3852 - DNA, 2217 bp, Artificial Sequence
  Description of Artificial Sequence: Synthetic polynucleotide
atggctgccgatggttatcttccagattggctcgaggacaacctctctgagggcattcgcgagtggtgggcgctgaaacctggagccccgaagcccaaagccaaccagcaaaagcaggacgacggccggggtctggtgcttcctggctacaagtacctcggacccttcaacggactcgacaagggggagcccgtcaacgcggcggacgcggcggccctcgagcacgacaaggcctacgaccagcagctgcaggcgggtgacaatccgtacctgcggtataaccacgccgacgccgagtttcaggagcgtctgcaagaagatacgtcttttgggggcaacctcgggcgagcagtcttccaggccaagaagcgggttctcgaacctctcggtctggttgaggaaggcgctaagacggctcctggaaagaagagaccggtagagccatcaccccagcgttctccagactcctctacgggcatcggcaagaagggccaacagcccgccagaaaaagactcaattttggtcagactggcgactcagagtcagttccagaccctcaacctctcggagaacctccagcagcgccctctggtgtgggacctaatacaatggctgcaggcggtggcgcaccaatggcagacaataacgaaggcgccgacggagtgggtagttcctcgggaaattggcattgcgattccacatggctgggcgacagagtcatcaccaccagcacccgaacctgggccctgcccacctacaacaaccacctctacaagcaaatctccaacgggacatcgggaggagccaccaacgacaacacctacttcggctacagcaccccctgggggtattttgactttaacagattccactgccacttttcaccacgtgactggcagcgactcatcaacaacaactggggattccggcccaagagactcagcttcaagctcttcaacatccaggtcaaggaggtcacgcagaatgaaggcaccaagaccatcgccaataacctcaccagcaccatccaggtgtttacggactcggagtaccagctgccgtacgttctcggctctgcccaccagggctgcctgcctccgttcccggcggacgtgttcacgattccccagtacggctacctaacactcaacaacggtagtcaggccgtgggacgctcctccttctactgcctggaatactttccttcgcagatgctgagaaccggcaacaacttccagtttacttacaccttcgaggacgtgcctttccacagcagctacgcccacagccagagcttggaccggctgatgaatcctctgattgaccagtacctgtactacttgtctcggattcaaacaacaggaggcacggcaaatacgcagactctgggcttcagccaaggtgggcctaatacaatggccaatcgggcaaagaactggctgccaggaccctgttaccgccaacaacgcgtctcaacgacaaccgggcaaaacaacaatagcaactttgcctggactgctgggaccaaataccatctgaatggaagaaattcattggctaatcctggcatcgctatggcaacacacaaagacgacgaggagcgtttttttcccagtaacgggatcctgatttttggcaaacaaaatgctgccagagacaatgcggattacagcgatgtcatgcccaccagcgaggaagaaatcaaaaccactaaccctgtggccacagaggaatacggtatcgtggcagataacttgcagcagcaaaacacggctcctcaaattggaactgtcaacagccagggggccttacccggtatggtctggcagaaccgggacgtgtacctgcagggtcccatctgggccaagattcctcacacggacggcaacttccacccgtctccgctgatgggcggctttggcctgaaacatcctccgcctcagatcctgatcaagaacacgcctgtacctgcggatcctccgaccaccttcaaccagtcaaagctgaactctttcatcacgcaatacagcaccggacaggtcagcgtggaaattgaatgggagctgcagaaggaaaacagcaagcgctggaaccccgagatccagtacacctccaactactacaaatctacaagtgtggactttgctgttaatacagaaggcgtgtactctgaaccccgccccattggcacccgttacctcacccgtaatctgtaa

SEQ ID NO: 3853 - DNA, 2217 bp, Artificial Sequence
  Description of Artificial Sequence: Synthetic polynucleotide
atggctgccgatggttatcttccagattggctcgaggacaacctctctgagggcattcgcgagtggtgggcgctgaaacctggagccccgaagcccaaagccaaccagcaaaagcaggacgacggccggggtctggtgcttcctggctacaagtacctcggacccttcaacggactcgacaagggggagcccgtcaacgcggcggacgcggcggccctcgagcacgacaaggcctacgaccagcagctgcaggcgggtgacaatccgtacctgcggtataaccacgccgacgccgagtttcaggagcgtctgcaagaagatacgtcttttgggggcaacctcgggcgagcagtcttccaggccaagaagcgggttctcgaacctctcggtctggttgaggaaggcgctaagacggctcctggaaagaagagaccggtagagccatcaccccagcgttctccagactcctctacgggcatcggcaagaagggccaacagcccgccagaaaaagactcaattttggtcagactggcgactcagagtcagttccagaccctcaacctctcggagaacctccagcagcgccctctggtgtgggacctaatacaatggctgcaggcggtggcgcaccaatggcagacaataacgaaggcgccgacggagtgggtagttcctcgggaaattggcattgcgattccacatggctgggcgacagagtcatcaccaccagcacccgaacctgggccctgcccacctacaacaaccacctctacaagcaaatctccaacgggacatcgggaggagccaccaacgacaacacctacttcggctacagcaccccctgggggtattttgactttaacagattccactgccacttttcaccacgtgactggcagcgactcatcaacaacaactggggattccggcccaagagactcagcttcaagctcttcaacatccaggtcaaggaggtcacgcagaatgaaggcaccaagaccatcgccaataacctcaccagcaccatccaggtgtttacggactcggagtaccagctgccgtacgttctcggctctgcccaccagggctgcctgcctccgttcccggcggacgtgttcacgattccccagtacggctacctaacactcaacaacggtagtcaggccgtgggacgctcctccttctactgcctggaatactttccttcgcagatgctgagaaccggcaacaacttccagtttacttacaccttcgaggacgtgcctttccacagcagctacgcccacagccagagcttggaccggctgatgaatcctctgattgaccagtacctgtactacttgtctcggattcaaacaacaggaggcacggcaaatacgcagactctgggcttcagccaaggtgggcctaatacaatggccaatcaggcaaagaactggctgccaggaccctgttaccgccaacaacgcgtctcaacgacaaccgggcaaaacaacaatagcaactttgcccggactgctgggaccaaataccatctgaatggaagaaattcattggctaatcctggcatcgctatggcaacacacaaagacgacgaggagcgtttttttcccagtaacgggatcctgatttttggcaaacaaaatgctgccagagacaatgcggattacagcgatgtcatgcccaccagcgaggaagaaatcaaaaccactaaccctgtggccacagaggaatacggtatcgtggcagataacttgcagcagcaaaacacggctcctcaaattggaactgtcaacagccagggggccttacccggtatggtctggcagaaccgggacgtgtacctgcagggtcccatctgggccaagattcctcacacggacggcaacttccacccgtctccgctgatgggcggctttggcctgaaacatcctccgcctcagatcctgatcaagaacacgcctgtacctgcggatcctccgaccaccttcaaccagtcaaagctgaactctttcatcacgcaatacagcaccggacaggtcagcgtggaaattgaatgggagctgcagaaggaaaacagcaagcgctggaaccccgagatccagtacacctccaactactacaaatctacaagtgtggactttgctgttaatacagaaggcgtgtactctgaaccccgccccattggcacccgttacctcacccgtaatctgtaa

SEQ ID NO: 3854 - DNA, 2217 bp, Artificial Sequence
  Description of Artificial Sequence: Synthetic polynucleotide
atggctgccgatggttatcttccagattggctcgaggacaacctctctgagggcattcgcgagtggtgggcgctgaaacctggagccccgaagcccaaagccaaccagcaaaagcaggacgacggccggggtctggtgcttcctggctacaagtacctcggacccttcaacggactcgacaagggggagcccgtcaacgcggcggacgcggcggccctcgagcacgacaaggcctacgaccagcagctgcaggcgggtgacaatccgtacctgcggtataaccacgccgacgccgagtttcaggagcgtctgcaagaagatacgtcttttgggggcaacctcgggcgagcagtcttccaggccaagaagcgggttctcgaacctctcggtctggttgaggaaggcgctaagacggctcctggaaagaagagaccggtagagccatcaccccagcgttctccagactcctctacgggcatcggcaagaagggccaacagcccgccagaaaaagactcaattttggtcagactggcgactcagagtcagttccagaccctcaacctctcggagaacctccagcagcgccctctggtgtgggacctaatacaatggctgcaggcggtggcgcaccaatggcagacaataacgaaggcgccgacggagtgggtagttcctcgggaaattggcattgcgattccacatggctgggcgacagagtcatcaccaccagcacccgaacctgggccctgcccacctacaacaaccacctctacaagcaaatctccaacgggacatcgggaggagccaccaacgacaacacctacttcggctacagcaccccctgggggtattttgactttaacagatcccactgccacttttcaccacgtgactggcagcgactcatcaacaacaactggggattccggcccaagagactcagcttcaagctcttcaacatccaggtcaaggaggtcacgcagaatgaaggcaccaagaccatcgccaataacctcaccagcaccatccaggtgtttacggactcggagtaccagctgccgtacgttctcggctctgcccaccagggctgcctgcctccgttcccggcggacgtgttcacgattccccagtacggctacctaacactcaacaacggtagtcaggccgtgggacgctcctccttctactgcctggaatactttccttcgcagatgctgagaaccggcaacaacttccagtttacttacaccttcgaggacgtgcctttccacagcagctacgcccacagccagagcttggaccggctgatgaatcctctgattgaccagtacctgtactacttgtctcggattcaaacaacaggaggcacggcaaatacgcagactctgggcttcagccaaggtgggcctaatacaatggccaatcaggcaaagaactggctgccaggaccctgttaccgccaacaacgcgtctcaacgacaaccgggcaaaacaacaatagcaactttgcctggactgctgggaccaaataccatctgaatggaagaaattcattggctaatcctggcatcgctatggcaacacacaaagacgacgaggagcgtttttttcccagtaacgggatcctgatttttggcaaacaaaatgctgccagagacaatgcggattacagcgatgtcatgcccaccagcgaggaagaaatcaaaaccactaaccctgtggccacagaggaatacggtatcgtggcagataacttgcagcagcaaaacacggctcctcaaattggaactgtcaacagccagggggccttacccggtatggtctggcagaaccgggacgtgtacctgcagggtcccatctgggccaagattcctcacacggacggcaacttccacccgtctccgctgatgggcggctttggcctgaaacatcctccgcctcagatcctgatcaagaacacgcctgtacctgcggatcctccgaccaccttcaaccagtcaaagctgaactctttcatcacgcaatacagcaccggacaggtcagcgtggaaattgaatgggagctgcagaaggaaaacagcaagcgctggaaccccgagatccagtacacctccaactactacaaatctacaagtgtggactttgctgttaatacagaaggcgtgtactctgaaccccgccccattggcacccgttacctcacccgtaatctgtaa

SEQ ID NO: 3855 - DNA, 2217 bp, Artificial Sequence
  Description of Artificial Sequence: Synthetic polynucleotide
atggctgccgatggttatcttccagattggctcgaggacaacctctctgagggcattcgcgagtggtgggcgctgaaacctggagccccgaagcccaaagccaaccagcaaaagcaggacgacggccggggtctggtgcttcctggctacaagtacctcggacccttcaacggactcgacaagggggagcccgtcaacgcggcggacgcggcggccctcgagcacgacaaggcctacgaccagcagctgcaggcgggtgacaatccgtacctgcggtataaccacgccgacgccgagtttcaggagcgtctgcaagaagatacgtcttttgggggcaacctcgggcgagcagtcttccaggccaagaagcgggttctcgaacctctcggtctggttgaggaaggcgctaagacggctcctggaaagaagagaccggtagagccatcaccccagcgttctccagactcctctacgggcatcggcaagaagggccaacagcccgccagaaaaagactcaattttggtcagactggcgactcagagtcagttccagaccctcaacctctcggagaacctccagcagcgccctctggtgtgggacctaatacaatggctgcaggcggtggcgcaccaatggcagacaataacgaaggcgccgacggagtgggtagttcctcgggaaattggcattgcgattccacatggctgggcgacagagtcatcaccaccagcacccgaacctgggccctgcccacctacaacaaccacctctacaagcaaatctccaacgggacatcgggaggagccaccaacgacaacacctacttcggctacagcaccccctgggggtattttgactttaacagattccactgccacttttcaccacgtgactggcagcgactcatcaacaacaactggggattccggcccaagagactcagcttcaagctcttcaacatccaggtcaaggaggtcacgcagaatgaaggcaccaagaccatcgccaataacctcaccagcaccatccaggtgtttacggactcggagtaccagctgccgtacgttctcggctctgcccaccagggctgcctgcctccgttcccggcggacgtgttcacgattccccagtacggctacctaacactcaacaacggtagtcaggccgtgggacgctcctccttctactgcctggaatactttccttcgcagatgctgagaaccggcaacaacttccagtttacttacaccttcgaggacgtgcctttccacagcagctacgcccacagccagagcttggaccggctgatgaatcctctgattgaccagtacctgtactacttgtctcggattcaaacaacaggaggcacggcaaatacgcagactctgggcttcggccaaggtgggcctaatacaatggccaatcaggcaaagaactggctgccaggaccctgttaccgccaacaacgcgtctcaacgacaaccgggcaaaacaacaatagcaactttgcctggactgctgggaccaaataccatctgaatggaagaaattcattggctaatcctggcatcgctatggcaacacacaaagacgacgaggagcgtttttttcccagtaacgggatcctgatttttggcaaacaaaatgctgccagagacaatgcggattacagcgatgtcatgcccaccagcgaggaagaaatcaaaaccactaaccctgtggccacagaggaatacggtatcgtggcagataacttgcagcagcaaaacacggctcctcaaattggaactgtcaacagccagggggccttacccggtatggtctggcagaaccgggacgtgtacctgcagggtcccatctgggccaagattcctcacacggacggcaacttccacccgtctccgctgatgggcggctttggcctgaaacatcctccgcctcagatcctgatcaagaacacgcctgtacctgcggatcctccgaccaccttcaaccagtcaaagctgaactctttcatcacgcaatacagcaccggacaggtcagcgtggaaattgaatgggagctgcagaaggaaaacagcaagcgctggaaccccgagatccagtacacctccaactactacaaatctacaagtgtggactttgctgttaatacagaaggcgtgtactctgaaccccgccccattggcacccgttacctcacccgtaatctgtaa

SEQ ID NO: 3856 - DNA, 2217 bp, Artificial Sequence
  Description of Artificial Sequence: Synthetic polynucleotide
atggctgccgatggttatcttccagattggctcgaggacaacctctctgagggcattcgcgagtggtgggcgctgaaacctggagccccgaagcccaaagccaaccagcaaaagcaggacgacggccggggtctggtgcttcctggctacaagtacctcggacccttcaacggactcgacaagggggagcccgtcaacgcggcggacgcggcggccctcgagcacgacaaggcctacgaccagcagctgcaggcgggtgacaatccgtacctgcggtataaccacgccgacgccgagtttcaggagcgtctgcaagaagatacgtcttttgggggcaacctcgggcgagcagtcttccaggccaagaagcgggttctcgaacctctcggtctggttgaggaaggcgctaagacggctcctggaaagaagagaccggtagagccatcaccccagcgttctccagactcctctacgggcatcggcaagaagggccaacagcccgccagaaaaagactcaattttggtcagactggcgactcagagtcagttccagaccctcaacctctcggagaacctccagcagcgccctctggtgtgggacctaatacaatggctgcaggcggtggcgcaccaatggcagacaataacgaaggcgccgacggagtgggtagttcctcgggaaattggcattgcgattccacatggctgggcgacagagtcatcaccaccagcacccgaacctgggccctgcccacctacaacaaccacctctacaagcaaatctccaacgggacatcgggaggagccaccaacgacaacacctacttcggctacagcaccccctgggggtattttgactttaacagattccactgccacttttcaccacgtgactggcagcgactcatcaacaacaactggggattccggcccaagagactcagcttcaagctcttcaacatccaggtcaaggaggtcacgcagaatgaaggcaccaagaccatcgccaataacctcaccagcaccatccaggtgtttacggactcggagtaccagctgccgtacgttctcggctctgcccaccagggctgcctgcctccgttcccggcggacgtgttcacgattccccagtacggctacctaacactcaacaacggtagtcaggccgtgggacgctcctccttctactgcctggaatactttccttcgcagatgctgagaaccggcaacaacttccagtttacttacaccttcgaggacgtgcctttccacagcagctacgcccacagccagagcttggaccggctgatgaatcctctgattgaccagtacctgtactacttgtctcggattcaaacaacaggaggcacggcaaatacgcagactctgggcttcagccaaggtgggcctaatacaatggccaatcaggcaaagaactggctgccaggaccctgttaccgccaacaacgcgcctcaacgacaaccgggcaaaacaacaatagcaactttgcctggactgctgggaccaaataccatctgaatggaagaaattcattggctaatcctggcatcgctatggcaacacacaaagacgacgaggagcgtttttttcccagtaacgggatcctgatttttggcaaacaaaatgctgccagagacaatgcggattacagcgatgtcatgcccaccagcgaggaagaaatcaaaaccactaaccctgtggccacagaggaatacggtatcgtggcagataacttgcagcagcaaaacacggctcctcaaattggaactgtcaacagccagggggccttacccggtatggtctggcagaaccgggacgtgtacctgcagggtcccatctgggccaagattcctcacacggacggcaacttccacccgtctccgctgatgggcggctttggcctgaaacatcctccgcctcagatcctgatcaagaacacgcctgtacctgcggatcctccgaccaccttcaaccagtcaaagctgaactctttcatcacgcaatacagcaccggacaggtcagcgtggaaattgaatgggagctgcagaaggaaaacagcaagcgctggaaccccgagatccagtacacctccaactactacaaatctacaagtgtggactttgctgttaatacagaaggcgtgtactctgaaccccgccccattggcacccgttacctcacccgtaatctgtaa

SEQ ID NO: 3857 - DNA, 2217 bp, Artificial Sequence
  Description of Artificial Sequence: Synthetic polynucleotide
atggctgccgatggttatcttccagattggctcgaggacaacctctctgagggcattcgcgagtggtgggcgctgaaacctggagccccgaagcccaaagccaaccagcaaaagcaggacgacggccggggtctggtgcttcctggctacaagtacctcggacccttcaacggactcgacaagggggagcccgtcaacgcggcggacgcggcggccctcgagcacgacaaggcctacgaccagcagctgcaggcgggtgacaatccgtacctgcggtataaccacgccgacgccgagtttcaggagcgtctgcaagaagatacgtcttttgggggcaacctcgggcgagcagtcttccaggccaagaagcgggttctcgaacctctcggtctggttgaggaaggcgctaagacggctcctggaaagaagagaccggtagagccatcaccccagcgttctccagactcctctacgggcatcggcaagaagggccaacagcccgccagaaaaagactcaattttggtcagactggcgactcagagtcagttccagaccctcaacctctcggagaacctccagcagcgccctctggtgtgggacctaatacaatggctgcaggcggtggcgcaccaatggcagacaataacgaaggcgccgacggagtgggtagttcctcgggaaattggcattgcgattccacatggctgggcgacagagtcatcaccaccagcacccgaacctgggccctgcccacctacaacaaccacctctacaagcaaatctccaacgggacatcgggaggagccaccaacgacaacacctacttcggctacagcaccccctgggggtattttgactttaacagattccactgccacttttcaccacgtgactggcagcgactcatcaacaacaactggggattccggcccaagagactcagcttcaagctcttcaacatccaggtcaaggaggtcacgcagaatgaaggcaccaagaccatcgccaataacctcaccagcaccatccaggtgtttacggactcggagtaccagctgccgtacgttctcggctctgcccaccagggctgcctgcctccgttcccggcggacgtgttcacgattccccagtacggctacctaacactcaacaacggtagtcaggccgtgggacgctcctccttctactgcctggaatactttccttcgcagatgctgagaaccggcaacaacttccagtttacttacaccttcgaggacgtgcctttccacagcagctacgcccacagccagagcttggaccggctgatgaatcctctgattgaccagtacctgtactacttgtctcggattcaaacaacaggaggcacggcaaatacgcagactctgggcttcagccaaggtgggcctaatacaatggccaatcaggcaaagaactggctgccaggaccctgttaccgccaacaacgcgtctcaacgacaaccgggcaaaacaacaatagcaactttgcctggactgctgggaccaaataccatctgaatggaagaaattcattggctaatcctggcatcgctatggcaacacacaaagacgacgaggagcgtttttttcccagtaacgggatcctgatttttggcaaacaaaatgctgccagagacaatgcggattacagcgatgtcatacccaccagcgaggaagaaatcaaaaccactaaccctgtggccacagaggaatacggtatcgtggcagataacttgcagcagcaaaacacggctcctcaaattggaactgtcaacagccagggggccttacccggtatggtctggcagaaccgggacgtgtacctgcagggtcccatctgggccaagattcctcacacggacggcaacttccacccgtctccgctgatgggcggctttggcctgaaacatcctccgcctcagatcctgatcaagaacacgcctgtacctgcggatcctccgaccaccttcaaccagtcaaagctgaactctttcatcacgcaatacagcaccggacaggtcagcgtggaaattgaatgggagctgcagaaggaaaacagcaagcgctggaaccccgagatccagtacacctccaactactacaaatctacaagtgtggactttgctgttaatacagaaggcgtgtactctgaaccccgccccattggcacccgttacctcacccgtaatctgtaa

SEQ ID NO: 3858 - DNA, 2217 bp, Artificial Sequence
  Description of Artificial Sequence: Synthetic polynucleotide
atggctgccgatggttatcttccagattggctcgaggacaacctctctgagggcattcgcgagtggtgggcgctgaaacctggagccccgaagcccaaagccaaccagcaaaagcaggacgacggccggggtctggtgcttcctggctacaagtacctcggacccttcaacggactcgacaagggggagcccgtcaacgcggcggacgcggcggccctcgagcacgacaaggcctacgaccagcagctgcaggcgggtgacaatccgtacctgcggtataaccacgccgacgccgagtttcaggagcgtctgcaagaagatacgtcttttgggggcaacctcgggcgagcagtcttccaggccaagaagcgggttctcgaacctctcggtctggttgaggaaggcgctaagacggctcctggaaagaagagaccggtagagccatcaccccagcgttctccagactcctctacgggcatcggcaagaagggccaacagcccgccagaaaaagactcaattttggtcagactggcgactcagagtcagttccagaccctcaacctctcggagaacctccagcagcgccctctggtgtgggacctaatacaatggctgcaggcggtggcgcaccaatggcagacaataacgaaggcgccgacggagtgggtagttcctcgggaaattggcattgcgattccacatggctgggcgacagagtcatcaccaccagcacccgaacctgggccctgcccacctacaacaaccacctctacaagcaaatctccaacgggacatcgggaggagccaccaacgacaacacctacttcggctacagcaccccctgggggtattttgactttaacagattccactgccacttttcaccacgtgactggcagcgactcatcaacaacaactggggattccggcccaagagactcagcttcaagctcttcaacatccaggtcaaggaggtcacgcagaatgaaggcaccaagaccatcgccaataacctcaccagcaccatccaggtgtttacggactcggagtaccagctgccgtacgttctcggctctgcccaccagggctgcctgcctccgttcccggcggacgtgttcacgattccccagtacggctacctaacactcaacaacggtagtcaggccgtgggacgctcctccttctactgcctggaatactttccttcgcagatgctgagaaccggcaacaacttccagtttacttacaccttcgaggacgtgcctttccacagcagctacgcccacagccagagcttggaccggctgatgaatcctctgattgaccagtacctgtactacttgtctcggattcaaacaacaggaggcacggcaaatacgcagactctgggcttcagccaaggtgggcctaatacaatggccaatcaggcaaagaactggctgccaggaccctgttaccgccaacaacgcgtctcaacgacaaccgggcaaaacaacaatagcaactttgcctggactgctgggaccaaataccatctgaatggaagaaattcattggctaatcctggcatcgctatggcaacacacaaagacgacgaggagcgtttttttcccagtaacgggatcctgatttttggcaaacaaaatgctgccagagacaatgcggattacagcgatgtcatgcccaccagcgaggaagaaatcaaaaccactaaccctgtggccacagaggaatacggtatcgtggcagataacttgcagcagcaaaacacggctcctcaaattggaactgccaacagccagggggccttacccggtatggtctggcagaaccgggacgtgtacctgcagggtcccatctgggccaagattcctcacacggacggcaacttccacccgtctccgctgatgggcggctttggcctgaaacatcctccgcctcagatcctgatcaagaacacgcctgtacctgcggatcctccgaccaccttcaaccagtcaaagctgaactctttcatcacgcaatacagcaccggacaggtcagcgtggaaattgaatgggagctgcagaaggaaaacagcaagcgctggaaccccgagatccagtacacctccaactactacaaatctacaagtgtggactttgctgttaatacagaaggcgtgtactctgaaccccgccccattggcacccgttacctcacccgtaatctgtaa

SEQ ID NO: 3859 - DNA, 2217 bp, Artificial Sequence
  Description of Artificial Sequence: Synthetic polynucleotide
atggctgccgatggttatcttccagattggctcgaggacaacctctctgagggcattcgcgagtggtgggcgctgaaacctggagccccgaagcccaaagccaaccagcaaaagcaggacgacggccggggtctggtgcttcctggctacaagtacctcggacccttcaacggactcgacaagggggagcccgtcaacgcggcggacgcggcggccctcgagcacgacaaggcctacgaccagcagctgcaggcgggtgacaatccgtacctgcggtataaccacgccgacgccgagtttcaggagcgtctgcaagaagatacgtcttttgggggcaacctcgggcgagcagtcttccaggccaagaagcgggttctcgaacctctcggtctggttgaggaaggcgctaagacggctcctggaaagaagagaccggtagagccatcaccccagcgttctccagactcctctacgggcatcggcaagaagggccaacagcccgccagaaaaagactcaattttggtcagactggcgactcagagtcagttccagaccctcaacctctcggagaacctccagcagcgccctctggtgtgggacctaatacaatggctgcaggcggtggcgcaccaatggcagacaataacgaaggcgccgacggagtgggtagttcctcgggaaattggcattgcgattccacatggctgggcgacagagtcatcaccaccagcacccgaacctgggccctgcccacctacaacaaccacctctacaagcaaatctccaacgggacatcgggaggagccaccaacgacaacacctacttcggctacagcaccccctgggggtattttgactttaacagattccactgccacttttcaccacgtgactggcagcgactcatcaacaacaactggggattccggcccaagagactcagcttcaagctcttcaacatccaggtcaaggaggtcacgcagaatgaaggcaccaagaccatcgccaataacctcaccagcaccatccaggtgtttacggactcggagtaccagctgccgtacgttctcggctctgcccaccagggctgcctgcctccgttcccggcggacgtgttcacgattccccagtacggctacctaacactcaacaacggtagtcaggccgtgggacgctcctccttctactgcctggaatactttccttcgcagatgctgagaaccggcaacaacttccagtttacttacaccttcgaggacgtgcctttccacagcagctacgcccacagccagagcttggaccggctgatgaatcctctgattgaccagtacctgtactacttgtctcggattcaaacaacaggaggcacggcaaatacgcagactctgggcttcagccaaggtgggcctaatacaatggccaatcaggcaaagaactggctgccaggaccctgttaccgccaacaacgcgtctcaacgacaaccgggcaaaacaacaatagcaactttgcctggactgctgggaccaaataccatctgaatggaagaaattcattggctaatcctggcatcgctatggcaacacacaaagacgacgaggagcgtttttttcccagtaacgggatcctgatttttggcaaacaaaatgctgccagagacaatgcggattacagcgatgtcatgcccaccagcgaggaagaaatcaaaaccactaaccctgtggccacagaggaatacggtatcgtggcagataacttgcagcagcaaaacacggctcctcaaattggaactgtcaacagccagggggccttacccggtatggtctggcagaaccgggacgtgtacctgcagggtcccatctgggccaagattcctcacacggacggcaacttccacccgtctccgctgatgggcggctttggcctgaaacatcctccgcctcagatcctgatcaagaacacgcctgtacctgcggatcctccgaccaccttcaaccagtcaaagctgaactctttcatcacgcaatacagcaccggacaggtcggcgtggaaattgaatgggagctgcagaaggaaaacagcaagcgctggaaccccgagatccagtacacctccaactactacaaatctacaagtgtggactttgctgttaatacagaaggcgtgtactctgaaccccgccccattggcacccgttacctcacccgtaatctgtaa

SEQ ID NO: 3860 - DNA, 2217 bp, Artificial Sequence
  Description of Artificial Sequence: Synthetic polynucleotide
atggctgccgatggttatcttccagattggctcgaggacaacctctctgagggcattcgcgagtggtgggcgctgaaacctggagccccgaagcccaaagccaaccagcaaaagcaggacgacggccggggtctggtgcttcctggctacaagtacctcggacccttcaacggactcgacaagggggagcccgtcaacgcggcggacgcggcggccctcgagcacggcaaggcctacgaccagcagctgcaggcgggtgacaatccgtacctgcggtataaccacgccgacgccgagtttcaggagcgtctgcaagaagatacgtcttttgggggcaacctcgggcgagcagtcttccaggccaagaagcgggttctcgaacctctcggtctggttgaggaaggcgctaagacggctcctggaaagaagagaccggtagagccatcaccccagcgttctccagactcctctacgggcatcggcaagaagggccaacagcccgccagaaaaagactcaattttggtcagactggcgactcagagtcagttccagaccctcaacctctcggagaacctccagcagcgccctctggtgtgggacctaatacaatggctgcaggcggtggcgcaccaatggcagacaataacgaaggcgccgacggagtgggtagttcctcgggaaattggcattgcgattccacatggctgggcgacagagtcatcaccaccagcacccgaacctgggccctgcccacctacaacaaccacctctacaagcaaatctccaacgggacatcgggaggagccaccaacgacaacacctacttcggctacagcaccccctgggggtattttgactttaacagattccactgccacttttcaccacgtgactggcagcgactcatcaacaacaactggggattccggcccaagagactcagcttcaagctcttcaacatccaggtcaaggaggtcacgcagaatgaaggcaccaagaccatcgccaataacctcaccagcaccatccaggtgtttacggactcggagtaccagctgccgtacgttctcggctctgcccaccagggctgcctgcctccgttcccggcggacgtgttcacgattccccagtacggctacctaacactcaacaacggtagtcaggccgtgggacgctcctccttctactgcctggaatactttccttcgcagatgctgagaaccggcaacaacttccagtttacttacaccttcgaggacgtgcctttccacagcagctacgcccacagccagagcttggaccggctgatgaatcctctgattgaccagtacctgtactacttgtctcggattcaaacaacaggaggcacggcaaatacgcagactctgggcttcagccaaggtgggcctaatacaatggccaatcaggcaaagaactggctgccaggaccctgttaccgccaacaacgcgtctcaacgacaaccgggcaaaacaacaatagcaactttgcctggactgctgggaccaaataccatctgaatggaagaaattcattggctaatcctggcatcgctatggcaacacacaaagacgacgaggagcgtttttttcccagtaacgggatcctgatttttggcaaacaaaatgctgccagagacaatgcggattacagcgatgtcatgcccaccagcgaggaagaaatcaaaaccactaaccctgtggccacagaggaatacggtatcgtggcagataacttgcagcagcaaaacacggctcctcaaattggaactgtcaacagccagggggccttacccggtatggtctggcagaaccgggacgtgtacctgcagggtcccatctgggccaagattcctcacacggacggcaacttccacccgtctccgctgatgggcggctttggcctgaaacatcctccgcctcagatcctgatcaagaacacgcctgtacctgcggatcctccgaccaccttcaaccagtcaaagctgaactctttcatcacgcaatacagcaccggacaggtcagcgtggaaattgaatgggagctgcagaaggaaaacagcaagcgctggaaccccgagatccagtacacctccaactactacaaatctacaagtgtggactttgctgttaatacagaaggcgtgtactctgaaccccgccccattggcacccgttacctcacccgtaatctgtaa

SEQ ID NO: 3861 - DNA, 2217 bp, Artificial Sequence
  Description of Artificial Sequence: Synthetic polynucleotide
atggctgccgatggttatcttccagattggctcgaggacaacctctctgagggcattcgcgagtggtgggcgctgaaacctggagccccgaagcccaaagccaaccagcaaaagcaggacgacggccggggtctggtgcttcctggctacaagtacctcggacccttcaacggactcgacaagggggagcccgtcaacgcggcggacgcggcggccctcgagcacgacaaggcctacgaccagcagctgcaggcgggtgacaatccgtacctgcggtataaccacgccgacgccgagtttcaggagcgtctgcaagaagatacgtcttttgggggcaacctcgggcgagcagtcttccaggccaagaagcgggttctcgaacctctcggtctggttgaggaaggcgctaagacggctcctggaaagaagagaccggtagagccatcaccccagcgttctccagactcctctacgggcatcggcaagaagggccaacagcccgccagaaaaagactcaattttggtcagactggcgactcagagtcagttccagaccctcaacctctcggagaacctccagcagcgccctctggtgtgggacctaatacaatggctgcaggcggtggcgcaccaatggcagacaataacgaaggcgccgacggagtgggtagttcctcgggaaattggcattgcgattccacatggctgggcgacagagtcatcaccaccagcacccgaacctgggccctgcccacctacaacaaccacctctacaagcaaatctccaacgggacatcgggaggagccaccaacgacaacacctacttcggctacagcaccccctgggggtattttgactttaacagattccactgccacttttcaccacgtgactggcagcgactcatcaacaacaactggggattccggcccaagagactcagcttcaagctcttcaacatccaggtcaaggaggtcacgcagaatgaaggcaccaagaccatcgccaataacctcaccagcaccatccaggtgtttacggactcggagtaccagctgccgtacgttctcggctctgcccaccagggctgcctgcctccgttcccggcggacgtgttcacgattccccagtacggctacctaacactcaacaacggtagtcaggccgtgggacgctcctccttctactgcctggaatactttccttcgcagatgctgagaaccggcaacaacttccagtttacttacaccttcgaggacgtgcctttccacagcagctacgcccacagccagagcttggaccggctgatgaatcctctgattgaccagtacctgtactacttgtctcggattcaaacaacaggaggcacggcaaatacgcagactctgggcttcagccaaggtgggcctaatacaatggccaatcaggcaaagaactggctgccaggaccctgttaccgccaacaacgcgtctcaacgacaaccgggcaaaacaacaatagcaactttgcctggactgctgggaccaaataccatctgaatggaagaaattcattggctaatcctggcatcgctatggcaacacacaaagacgacgaggagcgtttttttcccagtaacgggatcctgatttttggcaaacaaaatgctgccagagacaatgcggattacagcgatgtcatgcccaccagcgaggaagaaatcaaaaccactaaccctgtggccacaggggaatacggtatcgtggcagataacttgcagcagcaaaacacggctcctcaaattggaactgtcaacagccagggggccttacccggtatggtctggcagaaccgggacgtgtacctgcagggtcccatctgggccaagattcctcacacggacggcaacttccacccgtctccgctgatgggcggctttggcctgaaacatcctccgcctcagatcctgatcaagaacacgcctgtacctgcggatcctccgaccaccttcaaccagtcaaagctgaactctttcatcacgcaatacagcaccggacaggtcagcgtggaaattgaatgggagctgcagaaggaaaacagcaagcgctggaaccccgagatccagtacacctccaactactacaaatctacaagtgtggactttgctgttaatacagaaggcgtgtactctgaaccccgccccattggcacccgttacctcacccgtaatctgtaa

SEQ ID NO: 3862 - DNA, 2217 bp, Artificial Sequence
  Description of Artificial Sequence: Synthetic polynucleotide
atggctgccgatggttatcttccagattggctcgaggacaacctctctgagggcattcgcgagtggtgggcgctgaaacctggagccccgaagcccaaagccaaccagcaaaagcaggacgacggccggggtctggtgcttcctggctacaagtacctcggacccttcaacggactcgacaagggggagcccgtcaacgcggcggacgcggcggccctcgagcacgacaaggcctacgaccagcagctgcaggcgggtgacaatccgtacctgcggtataaccacgccgacgccgagtttcaggagcgtctgcaagaagatacgtcttttgggggcaacctcgggcgagcagtcttccaggccaagaagcgggttctcgaacctctcggtctggttgaggaaggcgctaagacggctcctggaaagaagagaccggtagagccatcaccccagcgttctccagactcctctacgggcatcggcaagaagggccaacagcccgccagaaaaagactcaattttggtcagactggcgactcagagtcagttccagaccctcaacctctcggagaacctccagcagcgccctctggtgtgggacctaatacaatggctgcaggcggtggcgcaccaatggcagacaataacgaaggcgccgacggagtgggtagttcctcgggaaattggcattgcgattccacatggctgggcgacagagtcatcaccaccagcacccgaacctgggccctgcccacccacaacaaccacctctacaagcaaatctccaacgggacatcgggaggagccaccaacgacaacacctacttcggctacagcaccccctgggggtattttgactttaacagattccactgccacttttcaccacgtgactggcagcgactcatcaacaacaactggggattccggcccaagagactcagcttcaagctcttcaacatccaggtcaaggaggtcacgcagaatgaaggcaccaagaccatcgccaataacctcaccagcaccatccaggtgtttacggactcggagtaccagctgccgtacgttctcggctctgcccaccagggctgcctgcctccgttcccggcggacgtgttcacgattccccagtacggctacctaacactcaacaacggtagtcaggccgtgggacgctcctccttctactgcctggaatactttccttcgcagatgctgagaaccggcaacaacttccagtttacttacaccttcgaggacgtgcctttccacagcagctacgcccacagccagagcttggaccggctgatgaatcctctgattgaccagtacctgtactacttgtctcggattcaaacaacaggaggcacggcaaatacgcagactctgggcttcagccaaggtgggcctaatacaatggccaatcaggcaaagaactggctgccaggaccctgttaccgccaacaacgcgtctcaacgacaaccgggcaaaacaacaatagcaactttgcctggactgctgggaccaaataccatctgaatggaagaaattcattggctaatcctggcatcgctatggcaacacacaaagacgacgaggagcgtttttttcccagtaacgggatcctgatttttggcaaacaaaatgctgccagagacaatgcggattacagcgatgtcatgcccaccagcgaggaagaaatcaaaaccactaaccctgtggccacagaggaatacggtatcgtggcagataacttgcagcagcaaaacacggctcctcaaattggaactgtcaacagccagggggccttacccggtatggtctggcagaaccgggacgtgtacctgcagggtcccatctgggccaagattcctcacacggacggcaacttccacccgtctccgctgatgggcggctttggcctgaaacatcctccgcctcagatcctgatcaagaacacgcctgtacctgcggatcctccgaccaccttcaaccagtcaaagctgaactctttcatcacgcaatacagcaccggacaggtcagcgtggaaattgaatgggagctgcagaaggaaaacagcaagcgctggaaccccgagatccagtacacctccaactactacaaatctacaagtgtggactttgctgttaatacagaaggcgtgtactctgaaccccgccccattggcacccgttacctcacccgtaatctgtaa

SEQ ID NO: 3863 - DNA, 2217 bp, Artificial Sequence
  Description of Artificial Sequence: Synthetic polynucleotide
atggctgccgatggttatcttccagattggctcgaggacaacctctctgagggcattcgcgagtggtgggcgctgaaacctggagccccgaagcccaaagccaaccagcaaaagcaggacgacggccggggtctggtgcttcctggctacaagtacctcggacccttcaacggactcgacaagggggagcccgtcaacgcggcggacgcggcggccctcgagcacgacaaggcctacgaccagcagctgcaggcgggtgacaatccgtacctgcggtataaccacgccgacgccgagtttcaggagcgtctgcaagaagatacgtcttttgggggcaacctcgggcgagcagtcttccaggccaagaagcgggttctcgaacctctcggtctggttgaggaaggcgctaagacggctcctggaaagaagagaccggtagagccatcaccccagcgttctccagactcctctacgggcatcggcaagaagggccaacagcccgccagaaaaagactcaattttggtcagactggcgactcagagtcagttccagaccctcaacctctcggagaacctccagcagcgccctctggtgtgggacctaatacaatggctgcaggcggtggcgcaccaatggcagacaataacgaaggcgccgacggagtgggtagttcctcgggaaattggcattgcgattccacatggctgggcgacagagtcatcaccaccagcacccgaacctgggccctgcccacctacaacaaccacctctacaagcaaatctccaacgggacatcgggaggagccaccaacgacaacacctacttcggctacagcaccccctgggggtattttgactttaacagattccactgccacttttcaccacgtgactggcagcgactcatcaacaacaactggggattccggcccaagagactcagcttcaagctcttcaacatccaggtcaaggaggtcacgcagaatgaaggcaccaagaccatcgccaataacctcaccagcaccatccaggtgtttacggactcggagtaccagctgccgtacgttctcggctctgcccaccagggctgcctgcctccgttcccggcggacgtgttcacgattccccagtacggctacctaacactcaacaacggtagtcaggccgtgggacgctcctccttctactgcctggaatactttccttcgcagatgctgagaaccggcaacaacttccagtttacttacaccttcgaggacgtgcctttccacagcagctacgcccacagccagagcttggaccggctgatgaatcctctgattgaccagtacctgtactacttgtctcggattcaaacaacaggaggcacggcaaatacgcagactctgggcttcagccaaggtgggcctaatacaatggccaatcaggcaaagaactggctgccaggaccctgttaccgccaacaacgcgtctcaacgacaaccgggcaaaacaacaatagcaactttgcctggactgctgggaccaaataccatctgaatggaagaaattcattggctaatcctggcatcgctatggcaacacacaaagacgacgaggagcgtttttttcccagtaacgggatcctgatttttggcaaacaaaatgctgccatagacaatgcggattacagcgatgtcatgcccaccagcgaggaagaaatcaaaaccactaaccctgtggccacagaggaatacggtatcgtggcagataacttgcagcagcaaaacacggctcctcaaattggaactgtcaacagccagggggccttacccggtatggtctggcagaaccgggacgtgtacctgcagggtcccatctgggccaagattcctcacacggacggcaacttccacccgtctccgctgatgggcggctttggcctgaaacatcctccgcctcagatcctgatcaagaacacgcctgtacctgcggatcctccgaccaccttcaaccagtcaaagctgaactctttcatcacgcaatacagcaccggacaggtcagcgtggaaattgaatgggagctgcagaaggaaaacagcaagcgctggaaccccgagatccagtacacctccaactactacaaatctacaagtgtggactttgctgttaatacagaaggcgtgtactctgaaccccgccccattggcacccgttacctcacccgtaatctgtaa

SEQ ID NO: 3864 - DNA, 2217 bp, Artificial Sequence
  Description of Artificial Sequence: Synthetic polynucleotide
atggctgccgatggttatcttccagattggctcgaggacaacctctctgagggcattcgcgagtggtgggcgctgaaacctggagccccgaagcccaaagccaaccagcaaaagcaggacgacggccggggtctggtgcttcctggctacaagtacctcggacccttcaacggactcgacaagggggagcccgtcaacgcggcggacgcggcggccctcgagcacgacaaggcctacgaccagcagctgcaggcgggtgacaatccgtacctgcggtataaccacgccgacgccgagtttcaggagcgtctgcaagaagatacgtcttttgggggcaacctcgggcgagcagtcttccaggccaagaagcgggttctcgaacctctcggtctggttgaggaaggcgctaagacggctcctggaaagaagagaccggtagagccatcaccccagcgttctccagactcctctacgggcatcggcaagaagggccaacagcccgccagaaaaagactcaattttggtcagactggcgactcagagtcagttccagaccctcaacctctcggagaacctccagcagcgccctctggtgtgggacctaatacaatggctgcaggcggtggcgcaccaatggcagacaataacgaaggcgccgacggagtgggtagttcctcgggaaattggcattgcgattccacatggctgggcgacagagtcatcaccaccagcacccgaacctgggccctgcccacctacaacaaccacctctacaagcaaatctccaacgggacatcgggaggagccaccaacgacaacacctacttcggctacagcaccccctgggggtattttgactttaacagattccactgccacttttcaccacgtgactggcagcgactcatcaacaacaactggggattccggcccaagagactcagcttcaagctcttcaacatccaggtcaaggaggtcacgcagaatgaaggcaccaagaccatcgccaataacctcaccagcaccatccaggtgtttacggactcggagtaccagctgccgtacgttctcggctctgcccaccagggctgcctgcctccgttcccggcggacgtgttcacgattccccagtacggctacctaacactcaacaacggtagtcaggccgtgggacgctcctccttctactgcctggaatactttccttcgcagatgctgagaaccggcaacaacttccagtttacttacaccttcgaggacgtgcctttccacagcagctacgcccacagccagagcttggaccggctgatgaatcctctgattgaccagtacctgtactacttgtctcggattcaaacaacaggaggcacggcaaatacgcagactctgggcttcagccaaggtgggcctaatacaatggccaatcaggcaaagaactggctgccaggaccctgttaccgccaacaacgcgtctcaacgacaaccgggcaaaacaacaatagcaactttgcctggactgctgggaccaaataccatctgaatggaagaaattcattggctaatcctggcatcgctatggcaacacacaaagacgacgaggggcgtttttttcccagtaacgggatcctgatttttggcaaacaaaatgctgccagagacaatgcggattacagcgatgtcatgcccaccagcgaggaagaaatcaaaaccactaaccctgtggccacagaggaatacggtatcgtggcagataacttgcagcagcaaaacacggctcctcaaattggaactgtcaacagccagggggccttacccggtatggtctggcagaaccgggacgtgtacctgcagggtcccatctgggccaagattcctcacacggacggcaacttccacccgtctccgctgatgggcggctttggcctgaaacatcctccgcctcagatcctgatcaagaacacgcctgtacctgcggatcctccgaccaccttcaaccagtcaaagctgaactctttcatcacgcaatacagcaccggacaggtcagcgtggaaattgaatgggagctgcagaaggaaaacagcaagcgctggaaccccgagatccagtacacctccaactactacaaatctacaagtgtggactttgctgttaatacagaaggcgtgtactctgaaccccgccccattggcacccgttacctcacccgtaatctgtaa

SEQ ID NO: 3865 - DNA, 2217 bp, Artificial Sequence
  Description of Artificial Sequence: Synthetic polynucleotide
atggctgccgatggttatcttccagattggctcgaggacaacctctctgagggcattcgcgagtggtgggcgctgaaacctggagccccgaagcccaaagccaaccagcaaaagcaggacgacggccggggtctggtgcttcctggctacaagtacctcggacccttcaacggactcgacaagggggagcccgtcaacgcggcggacgcggcggccctcgagcacgacaaggcctacgaccagcagctgcaggcgggtgacaatccgtacctgcggtataaccacgccgacgccgagtttcaggagcgtctgcaagaagatacgtcttttgggggcaacctcgggcgagcagtcttccaggccaagaagcgggttctcgaacctctcggtctggttgaggaaggcgctaagacggctcctggaaagaagagaccggtagagccatcaccccagcgttctccagactcctctacgggcatcggcaagaagggccaacagcccgccagaaaaagactcaattttggtcagactggcgactcagagtcagttccagaccctcaacctctcggagaacctccagcagcgccctctggtgtgggacctaatacaatggctgcaggcggtggcgcaccaatggcagacaataacgaaggcgccgacggagtgggtagttcctcgggaaattggcattgcgattccacatggctgggcgacagagtcatcaccaccagcacccgaacctgggccctgcccacctacaacaaccacctctacaagcaaatctccaacgggacatcgggaggagccaccaacgacaacacctacttcggctacagcaccccctgggggtattttgactttaacagattccactgccacttttcaccacgtgactggcagcgactcatcaacaacaactggggattccggaccaagagactcagcttcaagctcttcaacatccaggtcaaggaggtcacgcagaatgaaggcaccaagaccatcgccaataacctcaccagcaccatccaggtgtttacggactcggagtaccagctgccgtacgttctcggctctgcccaccagggctgcctgcctccgttcccggcggacgtgttcacgattccccagtacggctacctaacactcaacaacggtagtcaggccgtgggacgctcctccttctactgcctggaatactttccttcgcagatgctgagaaccggcaacaacttccagtttacttacaccttcgaggacgtgcctttccacagcagctacgcccacagccagagcttggaccggctgatgaatcctctgattgaccagtacctgtactacttgtctcggattcaaacaacaggaggcacggcaaatacgcagactctgggcttcagccaaggtgggcctaatacaatggccaatcaggcaaagaactggctgccaggaccctgttaccgccaacaacgcgtctcaacgacaaccgggcaaaacaacaatagcaactttgcctggactgctgggaccaaataccatctgaatggaagaaattcattggctaatcctggcatcgctatggcaacacacaaagacgacgaggagcgtttttttcccagtaacgggatcctgatttttggcaaacaaaatgctgccagagacaatgcggattacagcgatgtcatgcccaccagcgaggaagaaatcaaaaccactaaccctgtggccacagaggaatacggtatcgtggcagataacttgcagcagcaaaacacggctcctcaaattggaactgtcaacagccagggggccttacccggtatggtctggcagaaccgggacgtgtacctgcagggtcccatctgggccaagattcctcacacggacggcaacttccacccgtctccgctgatgggcggctttggcctgaaacatcctccgcctcagatcctgatcaagaacacgcctgtacctgcggatcctccgaccaccttcaaccagtcaaagctgaactctttcatcacgcaatacagcaccggacaggtcagcgtggaaattgaatgggagctgcagaaggaaaacagcaagcgctggaaccccgagatccagtacacctccaactactacaaatctacaagtgtggactttgctgttaatacagaaggcgtgtactctgaaccccgccccattggcacccgttacctcacccgtaatctgtaa

SEQ ID NO: 3866 - DNA, 2217 bp, Artificial Sequence
  Description of Artificial Sequence: Synthetic polynucleotide
atggctgccgatggttatcttccagattggctcgaggacaacctctctgagggcattcgcgagtggtgggcgctgaaacctggagccccgaagcccaaagccaaccagcaaaagcaggacgacggccggggtctggtgcttcctggctacaagtacctcggacccttcaacggactcgacaagggggagcccgtcaacgcggcggacgcggcggccctcgagcacgacaaggcctacgaccagcagctgcaggcgggtgacaatccgtacctgcggtataaccacgccgacgccgagtttcaggagcgtctgcaagaagatacgtcttttgggggcaacctcgggcgagcagtcttccaggccaagaagcgggttctcgaacctctcggtctggttgaggaaggcgctaagacggctcctggaaagaagagaccggtagagccatcaccccagcgttctccagactcctctacgggcatcggcaagaagggccaacagcccgccagaaaaagactcaattttggtcagactggcgactcagagtcagttccagaccctcaacctctcggagaacctccagcagcgccctctggtgtgggacctaatacaatggctgcaggcggtggcgcaccaatggcagacaataacgaaggcgccgacggagtgggtagttcctcgggaaattggcattgcgattccacatggctgggcgacagagtcatcaccaccagcacccgaacctgggccctgcccacctacaacaaccacctctacaagcaaatctccaacgggacatcgggaggagccaccaacgacaacacctacttcggctacagcaccccctgggggtattttgactttaacagattccactgccacttttcaccacgtgactggcagcgactcatcaacaacaactggggattccggcccaagagactcagcttcaagctcttcaacatccaggtcaaggaggtcacgcagaatgaaggcaccaagaccatcgccaataacctcaccagcaccatccaggtgtttacggactcggagtaccagctgccgtacgttctcggctctgcccaccagggctgcctgcctccgttcccggcggacgtgttcacgattccccagtacggctacctaacactcaacaacggtagtcaggccgtgggacgctcctccttctactgcctggaatactttccttcgcagatgctgagaaccggcaacaacttccagtttacttacaccttcgaggacgtgcctttccacagcagctacgcccacagccagagcttggaccggctgatgaatcctctgattgaccagtacctgtactacttgtctcggattcaaacaacaggaggcacggcaaatacgcagactctgggcttcagccaaggtgggcctaatacaatggccaatcaggcaaagaactggctgccaggaccctgttaccgccaacaacgcgtctcaacgacaaccgggcaaaacaacaatagcaactttgcctggactgctgggaccaaataccatctgaatggaagaaattcattggctaatcctggcatcgctatggcaacacacaaagacgacgaggagcgtttttttcccagtaacgggatcctgatttttggcaaacaaaatgctgccagagacaatgcggattacagcgatgtcatgcccaccagcgaggaagaaatcaaaaccactaaccctgtggccacagaggaatacggtatcgtggcagataacttgcagcagcaaaacacggctcctcaaattggaactgtcaacagccagggggccttacccggtatggtctggcagaaccgggacgtgtacctgcagggtcccatctgggccaagattcctcacacggacggcaacttccacccgtctccgctgatgggcggctttggcctgaaacatcctccgcctcagatcctgatcaagaacacgcctgtacctgcggatcctccgaccaccttcaaccagtcaaagctgaactctttcatcacgcaatgcagcaccggacaggtcagcgtggaaattgaatgggagctgcagaaggaaaacagcaagcgctggaaccccgagatccagtacacctccaactactacaaatctacaagtgtggactttgctgttaatacagaaggcgtgtactctgaaccccgccccattggcacccgttacctcacccgtaatctgtaa

SEQ ID NO: 3867 - DNA, 2217 bp, Artificial Sequence
  Description of Artificial Sequence: Synthetic polynucleotide
atggctgccgatggttatcttccagattggctcgaggacaacctctctgagggcattcgcgagtggtgggcgctgaaacctggagccccgaagcccaaagccaaccagcaaaagcaggacgacggccggggtctggtgcttcctggctacaagtacctcggacccttcaacggactcgacaagggggagcccgtcaacgcggcggacgcggcggccctcgagcacgacaaggcctacgaccagcagctgcaggcgggtgacaatccgtacctgcggtataaccacgccgacgccgagtttcaggagcgtctgcaagaagatacgtcttttgggggcaacctcgggcgagcagtcttccaggccaagaagcgggttctcgaacctctcggtctggttgaggaaggcgctaagacggctcctggaaagaagagaccggtagagccatcaccccagcgttctccagactcctctacgggcatcggcaagaagggccaacagcccgccagaaaaagactcaattttggtcagactggcgactcagagtcagttccagaccctcaacctctcggagaacctccagcagcgccctctggtgtgggacctaatacaatggctgcaggcggtggcgcaccaatggcagacaataacgaaggcgccgacggagtgggtagttcctcgggaaattggcattgcgattccacatggctgggcgacagagtcatcaccaccagcacccgaacctgggccctgcccacctacaacaaccacctctacaagcaaatctccaacgggacatcgggaggagccaccaacgacaacacctacttcggctacagcaccccctgggggtattttgactttaacagattccactgccacttttcaccacgtgactggcagcgactcatcaacaacaactggggattccggcccaagagactcagcttcaagctcttcaacatccaggtcaaggaggtcacgcagaatgaaggcaccaagaccatcgccaataacctcaccagcaccatccaggtgtttacggactcggagtaccagctgccgtacgttctcggctctgcccaccagggctgcctgcctccgttcccggcggacgtgttcacgattccccagtacggctacctaacactcaacaacggtagtcaggccgtgggacgctcctccttctactgcctggaatactttccttcgcagatgctgagaaccggcaacaacttccagtttacttacaccttcgaggacgtgcctttccgcagcagctacgcccacagccagagcttggaccggctgatgaatcctctgattgaccagtacctgtactacttgtctcggattcaaacaacaggaggcacggcaaatacgcagactctgggcttcagccaaggtgggcctaatacaatggccaatcaggcaaagaactggctgccaggaccctgttaccgccaacaacgcgtctcaacgacaaccgggcaaaacaacaatagcaactttgcctggactgctgggaccaaataccatctgaatggaagaaattcattggctaatcctggcatcgctatggcaacacacaaagacgacgaggagcgtttttttcccagtaacgggatcctgatttttggcaaacaaaatgctgccagagacaatgcggattacagcgatgtcatgcccaccagcgaggaagaaatcaaaaccactaaccctgtggccacagaggaatacggtatcgtggcagataacttgcagcagcaaaacacggctcctcaaattggaactgtcaacagccagggggccttacccggtatggtctggcagaaccgggacgtgtacctgcagggtcccatctgggccaagattcctcacacggacggcaacttccacccgtctccgctgatgggcggctttggcctgaaacatcctccgcctcagatcctgatcaagaacacgcctgtacctgcggatcctccgaccaccttcaaccagtcaaagctgaactctttcatcacgcaatacagcaccggacaggtcagcgtggaaattgaatgggagctgcagaaggaaaacagcaagcgctggaaccccgagatccagtacacctccaactactacaaatctacaagtgtggactttgctgttaatacagaaggcgtgtactctgaaccccgccccattggcacccgttacctcacccgtaatctgtaa

SEQ ID NO: 3868 - DNA, 2217 bp, Artificial Sequence
  Description of Artificial Sequence: Synthetic polynucleotide
atggctgccgatggttatcttccagattggctcgaggacaacctctctgagggcattcgcgagtggtgggcgctgaaacctggagccccgaagcccaaagccaaccagcaaaagcaggacgacggccggggtctggtgcttcctggctacaagcacctcggacccttcaacggactcgacaagggggagcccgtcaacgcggcggacgcggcggccctcgagcacgacaaggcctacgaccagcagctgcaggcgggtgacaatccgtacctgcggtataaccacgccgacgccgagtttcaggagcgtctgcaagaagatacgtcttttgggggcaacctcgggcgagcagtcttccaggccaagaagcgggttctcgaacctctcggtctggttgaggaaggcgctaagacggctcctggaaagaagagaccggtagagccatcaccccagcgttctccagactcctctacgggcatcggcaagaagggccaacagcccgccagaaaaagactcaattttggtcagactggcgactcagagtcagttccagaccctcaacctctcggagaacctccagcagcgccctctggtgtgggacctaatacaatggctgcaggcggtggcgcaccaatggcagacaataacgaaggcgccgacggagtgggtagttcctcgggaaattggcattgcgattccacatggctgggcgacagagtcatcaccaccagcacccgaacctgggccctgcccacctacaacaaccacctctacaagcaaatctccaacgggacatcgggaggagccaccaacgacaacacctacttcggctacagcaccccctgggggtattttgactttaacagattccactgccacttttcaccacgtgactggcagcgactcatcaacaacaactggggattccggcccaagagactcagcttcaagctcttcaacatccaggtcaaggaggtcacgcagaatgaaggcaccaagaccatcgccaataacctcaccagcaccatccaggtgtttacggactcggagtaccagctgccgtacgttctcggctctgcccaccagggctgcctgcctccgttcccggcggacgtgttcacgattccccagtacggctacctaacactcaacaacggtagtcaggccgtgggacgctcctccttctactgcctggaatactttccttcgcagatgctgagaaccggcaacaacttccagtttacttacaccttcgaggacgtgcctttccacagcagctacgcccacagccagagcttggaccggctgatgaatcctctgattgaccagtacctgtactacttgtctcggattcaaacaacaggaggcacggcaaatacgcagactctgggcttcagccaaggtgggcctaatacaatggccaatcaggcaaagaactggctgccaggaccctgttaccgccaacaacgcgtctcaacgacaaccgggcaaaacaacaatagcaactttgcctggactgctgggaccaaataccatctgaatggaagaaattcattggctaatcctggcatcgctatggcaacacacaaagacgacgaggagcgtttttttcccagtaacgggatcctgatttttggcaaacaaaatgctgccagagacaatgcggattacagcgatgtcatgcccaccagcgaggaagaaatcaaaaccactaaccctgtggccacagaggaatacggtatcgtggcagataacttgcagcagcaaaacacggctcctcaaattggaactgtcaacagccagggggccttacccggtatggtctggcagaaccgggacgtgtacctgcagggtcccatctgggccaagattcctcacacggacggcaacttccacccgtctccgctgatgggcggctttggcctgaaacatcctccgcctcagatcctgatcaagaacacgcctgtacctgcggatcctccgaccaccttcaaccagtcaaagctgaactctttcatcacgcaatacagcaccggacaggtcagcgtggaaattgaatgggagctgcagaaggaaaacagcaagcgctggaaccccgagatccagtacacctccaactactacaaatctacaagtgtggactttgctgttaatacagaaggcgtgtactctgaaccccgccccattggcacccgttacctcacccgtaatctgtaa

SEQ ID NO: 3869 - DNA, 2217 bp, Artificial Sequence
  Description of Artificial Sequence: Synthetic polynucleotide
atggctgccgatggttatcttccagattggctcgaggacaacctctctgagggcattcgcgagtggtgggcgctgaaacctggagccccgaagcccaaagccaaccagcaaaagcaggacgacggccggggtctggtgcttcctggctacaagtacctcggacccttcaacggactcgacaagggggagcccgtcaacgcggcggacgcggcggccctcgagcacgacaaggcctacgaccagcagctgcaggcgggtgacaatccgtacctgcggtataaccacgccgacgccgagtttcaggagcgtctgcaagaagatacgtcttttgggggcaacctcgggcgagcagtcttccaggccaagaagcgggttctcgaacctctcggtctggttgaggaaggcgctaagacggctcctggaaagaagagaccggtagagccatcaccccagcgttctccagactcctctacgggcatcggcaagaagggccaacagcccgccagaaaaagactcaattttggtcagactggcgactcagagtcagttccagaccctcaacctctcggagaacctccagcagcgccctctggtgtgggacctaatacaatggctgcaggcggtggcgcaccaatggcagacaataacgaaggcgccgacggagtgggtagttcctcgggaaattggcattgcgattccacatggctgggcgacagagtcatcaccaccagcacccgaacctgggccctgcccacctacaacaaccacctctacaagcaaatctccaacgggacatcgggaggagccaccaacgacaacacctacttcggctacagcaccccctgggggtattttgactttaacagattccactgccacttttcaccacgtgactggcagcgactcatcaacaacaactggggattccggcccaagagactcagcttcaagctcttcaacatccaggtcaaggaggtcacgcagaatgaaggcaccaagaccatcgccaataacctcaccagcaccatccaggtgtttacggactcggagtaccagctgccgtacgttctcggctctgcccaccagggctgcctgcctccgttcccggcggacgtgttcacgattccccagtacggctacctaacactcaacaacggtagtcaggccgtgggacgctcctccttctactgcctggaatactttccttcgcagatgctgagaaccggcaacaacttccagtttacttacaccttcgaggacgtgcctttccacagcagctacgcccacagccagagcttggaccggctgatgaatcctctgattgaccagtacctgtactacttgtctcggattcaaacaacaggaggcacggcaaatacgcagactctgggcttcagccaaggtgggcctaatacaatggccaatcaggcaaagaactggctgccaggaccctgttaccgccaacaacgcgtctcagcgacaaccgggcaaaacaacaatagcaactttgcctggactgctgggaccaaataccatctgaatggaagaaattcattggctaatcctggcatcgctatggcaacacacaaagacgacgaggagcgtttttttcccagtaacgggatcctgatttttggcaaacaaaatgctgccagagacaatgcggattacagcgatgtcatgcccaccagcgaggaagaaatcaaaaccactaaccctgtggccacagaggaatacggtatcgtggcagataacttgcagcagcaaaacacggctcctcaaattggaactgtcaacagccagggggccttacccggtatggtctggcagaaccgggacgtgtacctgcagggtcccatctgggccaagattcctcacacggacggcaacttccacccgtctccgctgatgggcggctttggcctgaaacatcctccgcctcagatcctgatcaagaacacgcctgtacctgcggatcctccgaccaccttcaaccagtcaaagctgaactctttcatcacgcaatacagcaccggacaggtcagcgtggaaattgaatgggagctgcagaaggaaaacagcaagcgctggaaccccgagatccagtacacctccaactactacaaatctacaagtgtggactttgctgttaatacagaaggcgtgtactctgaaccccgccccattggcacccgttacctcacccgtaatctgtaa

SEQ ID NO: 3870 - DNA, 2217 bp, Artificial Sequence
  Description of Artificial Sequence: Synthetic polynucleotide
atggctgccgatggttatcttccagattggctcgaggacaacctctctgagggcattcgcgagtggtgggcgctgaaacctggagccccgaagcccaaagccaaccagcaaaagcaggacgacggccggggtctggtgcttcctggctacaagtacctcggacccttcaacggactcgacaagggggagcccgtcaacgcggcggacgcggcggccctcgagcacgacaaggcctacgaccagcagctgcaggcgggtgacaatccgtacctgcggtataaccacgccgacgccgagtttcaggagcgtctgcaagaagatacgtcttttgggggcaacctcgggcgagcagtcttccaggccaagaagcgggttctcgaacctctcggtctggttgaggaaggcgctaagacggctcctggaaagaagagaccggtagagccatcaccccagcgttctccagactcctctacgggcatcggcaagaagggccaacagcccgccagaaaaagactcaattttggtcagactggcggctcagagtcagttccagaccctcaacctctcggagaacctccagcagcgccctctggtgtgggacctaatacaatggctgcaggcggtggcgcaccaatggcagacaataacgaaggcgccgacggagtgggtagttcctcgggaaattggcattgcgattccacatggctgggcgacagagtcatcaccaccagcacccgaacctgggccctgcccacctacaacaaccacctctacaagcaaatctccaacgggacatcgggaggagccaccaacgacaacacctacttcggctacagcaccccctgggggtattttgactttaacagattccactgccacttttcaccacgtgactggcagcgactcatcaacaacaactggggattccggcccaagagactcagcttcaagctcttcaacatccaggtcaaggaggtcacgcagaatgaaggcaccaagaccatcgccaataacctcaccagcaccatccaggtgtttacggactcggagtaccagctgccgtacgttctcggctctgcccaccagggctgcctgcctccgttcccggcggacgtgttcacgattccccagtacggctacctaacactcaacaacggtagtcaggccgtgggacgctcctccttctactgcctggaatactttccttcgcagatgctgagaaccggcaacaacttccagtttacttacaccttcgaggacgtgcctttccacagcagctacgcccacagccagagcttggaccggctgatgaatcctctgattgaccagtacctgtactacttgtctcggattcaaacaacaggaggcacggcaaatacgcagactctgggcttcagccaaggtgggcctaatacaatggccaatcaggcaaagaactggctgccaggaccctgttaccgccaacaacgcgtctcaacgacaaccgggcaaaacaacaatagcaactttgcctggactgctgggaccaaataccatctgaatggaagaaattcattggctaatcctggcatcgctatggcaacacacaaagacgacgaggagcgtttttttcccagtaacgggatcctgatttttggcaaacaaaatgctgccagagacaatgcggattacagcgatgtcatgcccaccagcgaggaagaaatcaaaaccactaaccctgtggccacagaggaatacggtatcgtggcagataacttgcagcagcaaaacacggctcctcaaattggaactgtcaacagccagggggccttacccggtatggtctggcagaaccgggacgtgtacctgcagggtcccatctgggccaagattcctcacacggacggcaacttccacccgtctccgctgatgggcggctttggcctgaaacatcctccgcctcagatcctgatcaagaacacgcctgtacctgcggatcctccgaccaccttcaaccagtcaaagctgaactctttcatcacgcaatacagcaccggacaggtcagcgtggaaattgaatgggagctgcagaaggaaaacagcaagcgctggaaccccgagatccagtacacctccaactactacaaatctacaagtgtggactttgctgttaatacagaaggcgtgtactctgaaccccgccccattggcacccgttacctcacccgtaatctgtaa

SEQ ID NO: 3871 - DNA, 2217 bp, Artificial Sequence
  Description of Artificial Sequence: Synthetic polynucleotide
atggctgccgatggttatcttccagattggctcgaggacaacctctctgagggcattcgcgagtggtgggcgctgaaacctggagccccgaagcccaaagccaaccagcaaaagcaggacgacggccggggtctggtgcttcctggctacaagtacctcggacccttcaacggactcgacaagggggagcccgtcaacgcggcggacgcggcggccctcgagcacgacaaggcctacgaccagcagctgcaggcgggtgacaatccgtacctgcggtataaccacgccgacgccgagtttcaggagcgtctgcaagaagatacgtcttttgggggcaacctcgggcgagcagtcttccaggccaagaagcgggttctcgaacctctcggtctggttgaggaaggcgctaagacggctcctggaaagaagagaccggtagagccatcaccccagcgttctccagactcctctacgggcatcggcaagaagggccaacagcccgccagaaaaagactcaattttggtcagactggcgactcagagtcagttccagaccctcaacctctcggagaacctccagcagcgccctctggtgtgggacctaatacaatggctgcaggcggtggcgcaccaatggcagacaataacgaaggcgccgacggagtgggtagttcctcgggaaattggcattgcgattccgcatggctgggcgacagagtcatcaccaccagcacccgaacctgggccctgcccacctacaacaaccacctctacaagcaaatctccaacgggacatcgggaggagccaccaacgacaacacctacttcggctacagcaccccctgggggtattttgactttaacagattccactgccacttttcaccacgtgactggcagcgactcatcaacaacaactggggattccggcccaagagactcagcttcaagctcttcaacatccaggtcaaggaggtcacgcagaatgaaggcaccaagaccatcgccaataacctcaccagcaccatccaggtgtttacggactcggagtaccagctgccgtacgttctcggctctgcccaccagggctgcctgcctccgttcccggcggacgtgttcacgattccccagtacggctacctaacactcaacaacggtagtcaggccgtgggacgctcctccttctactgcctggaatactttccttcgcagatgctgagaaccggcaacaacttccagtttacttacaccttcgaggacgtgcctttccacagcagctacgcccacagccagagcttggaccggctgatgaatcctctgattgaccagtacctgtactacttgtctcggattcaaacaacaggaggcacggcaaatacgcagactctgggcttcagccaaggtgggcctaatacaatggccaatcaggcaaagaactggctgccaggaccctgttaccgccaacaacgcgtctcaacgacaaccgggcaaaacaacaatagcaactttgcctggactgctgggaccaaataccatctgaatggaagaaattcattggctaatcctggcatcgctatggcaacacacaaagacgacgaggagcgtttttttcccagtaacgggatcctgatttttggcaaacaaaatgctgccagagacaatgcggattacagcgatgtcatgcccaccagcgaggaagaaatcaaaaccactaaccctgtggccacagaggaatacggtatcgtggcagataacttgcagcagcaaaacacggctcctcaaattggaactgtcaacagccagggggccttacccggtatggtctggcagaaccgggacgtgtacctgcagggtcccatctgggccaagattcctcacacggacggcaacttccacccgtctccgctgatgggcggctttggcctgaaacatcctccgcctcagatcctgatcaagaacacgcctgtacctgcggatcctccgaccaccttcaaccagtcaaagctgaactctttcatcacgcaatacagcaccggacaggtcagcgtggaaattgaatgggagctgcagaaggaaaacagcaagcgctggaaccccgagatccagtacacctccaactactacaaatctacaagtgtggactttgctgttaatacagaaggcgtgtactctgaaccccgccccattggcacccgttacctcacccgtaatctgtaa

SEQ ID NO: 3872 - DNA, 2217 bp, Artificial Sequence
  Description of Artificial Sequence: Synthetic polynucleotide
atggctgccgatggttatcttccagattggctcgaggacaacctctctgagggcattcgcgagtggtgggcgctgaaacctggagccccgaagcccaaagccaaccagcaaaagcaggacgacggccggggtctggtgcttcctggctacaagtacctcggacccttcaacggactcgacaagggggagcccgtcaacgcggcggacgcggcggccctcgagcacgacaaggcctacgaccagcagctgcaggcgggtgacaatccgtacctgcggtataaccacgccgacgccgagtttcaggagcgtctgcaagaagatacgtcttttgggggcaacctcgggcgagcagtcttccaggccaagaagcgggttctcgaacctctcggtctggttgaggaaggcgctaagacggctcctggaaagaagagaccggtagagccatcaccccagcgttctccagactcctctacgggcatcggcaagaagggccaacagcccgccagaaaaagactcaattttggtcagactggcgactcagagtcagttccagaccctcaacctctcggagaacctccagcagcgccctctggtgtgggacctaatacaatggctgcaggcggtggcgcaccaatggcagacaataacgaaggcgccgacggagtgggtagttcctcgggaaattggcattgcgattccacatggctgggcgacagagtcatcaccaccagcacccgaacctgggccctgcccacctacaacaaccacctctacaagcaaatctccaacgggacatcgggaggagccaccaacgacaacacctacttcggctacagcaccccctgggggtattttgactttaacagattccactgccacttttcaccacgtgactggcagcgactcatcaacaacaactggggattccggcccaagagactcagcttcaagctcttcaacatccaggtcaaggaggtcacgcagaatgaaggcaccaagaccatcgccaataacctcaccagcaccatccaggtgtttacggactcggagtaccagctgccgtacgttctcggctctgcccaccggggctgcctgcctccgttcccggcggacgtgttcacgattccccagtacggctacctaacactcaacaacggtagtcaggccgtgggacgctcctccttctactgcctggaatactttccttcgcagatgctgagaaccggcaacaacttccagtttacttacaccttcgaggacgtgcctttccacagcagctacgcccacagccagagcttggaccggctgatgaatcctctgattgaccagtacctgtactacttgtctcggattcaaacaacaggaggcacggcaaatacgcagactctgggcttcagccaaggtgggcctaatacaatggccaatcaggcaaagaactggctgccaggaccctgttaccgccaacaacgcgtctcaacgacaaccgggcaaaacaacaatagcaactttgcctggactgctgggaccaaataccatctgaatggaagaaattcattggctaatcctggcatcgctatggcaacacacaaagacgacgaggagcgtttttttcccagtaacgggatcctgatttttggcaaacaaaatgctgccagagacaatgcggattacagcgatgtcatgcccaccagcgaggaagaaatcaaaaccactaaccctgtggccacagaggaatacggtatcgtggcagataacttgcagcagcaaaacacggctcctcaaattggaactgtcaacagccagggggccttacccggtatggtctggcagaaccgggacgtgtacctgcagggtcccatctgggccaagattcctcacacggacggcaacttccacccgtctccgctgatgggcggctttggcctgaaacatcctccgcctcagatcctgatcaagaacacgcctgtacctgcggatcctccgaccaccttcaaccagtcaaagctgaactctttcatcacgcaatacagcaccggacaggtcagcgtggaaattgaatgggagctgcagaaggaaaacagcaagcgctggaaccccgagatccagtacacctccaactactacaaatctacaagtgtggactttgctgttaatacagaaggcgtgtactctgaaccccgccccattggcacccgttacctcacccgtaatctgtaa

SEQ ID NO: 3873 - DNA, 2217 bp, Artificial Sequence
  Description of Artificial Sequence: Synthetic polynucleotide
atggctgccgatggttatcttccagattggctcgaggacaacctctctgagggcattcgcgagtggtgggcgctgaaacctggagccccgaagcccaaagccaaccagcaaaagcaggacgacggccggggtctggtgcttcctggctacaagtacctcggacccttcaacggactcgacaagggggagcccgtcaacgcggcggacgcggcggccctcgagcacgacaaggcctacgaccagcagctgcaggcgggtgacaatccgtacctgcggtataaccacgccgacgccgagtttcaggagcgtctgcaagaagatacgtcttttgggggcaacctcgggcgagcagtcttccaggccaagaagcgggttctcgaacctctcggtctggttgaggaaggcgctaagacggctcctggaaagaagagaccggtagagccatcaccccagcgttctccagactcctctacgggcatcggcaagaagggccaacagcccgccagaaaaagactcaattttggtcagactggcgactcagagtcagttccagaccctcaacctctcggagaacctccagcagcgccctctggtgtgggacctaatacaatggctgcaggcggtggcgcaccaatggcagacaataacgaaggcgccgacggagtgggtagttcctcgggaaattggcattgcgattccacatggctgggcgacagagtcatcaccaccagcacccgaacctgggccctgcccacctacaacaaccacctctacaagcaaatctccaacgggacatcgggaggagccaccaacgacaacacctacttcggctacagcaccccctgggggtattttgactttaacagattccactgccacttttcaccacgtgactggcagcgactcatcaacaacaactggggattccggcccaagagactcagcttcaagctcttcaacatccaggtcaaggaggtcacgcagaatgaaggcaccaagaccatcgccaataacctcaccagcaccatccaggtgtttacggactcggagtaccagctgccgtacgttctcggctctgcccaccagggctgcctgcctccgttcccggcggacgtgttcacgattccccagtacggctacctaacactcaacaacggtagtcaggccgtgggacgctcctccttctactgcctggaatactttccttcgcagatgctgagaaccggcaacaacttccagtttacttacaccttcgaggacgtgcctttccacagcagctacgcccacagccagagcttggaccggctgatgaatcctctgattgaccagtacctgtactacttgtctcggattcaaacaacaggaggcacggcaaatacgcagactctgggcttcagccaaggtgggcctaatacaatggccaatcaggcaaagaactggctgccaggaccctgttaccgccaacaacgcgtctcaacgacaaccgggcaaaacaacaatagcaactttgcctggactgctgggaccaaataccatctgaatggaagaaattcattggctaatcctggcatcgctatggcaacacacaaagacgacgaggagcgtttttttcccagtaacgggatcctgatttttggcaaacaaaatgctgccagagacaatgcggattacagcgatgtcatgcccaccagcgaggaagaaatcaaaaccactaaccctgtggccacagaggaatacggtatcgtggcagataacttgcagcagcaaaacacggctcctcaaattggaactgtcaacagccagggggccttacccggtatggtctggcagaaccgggacgtgtacctgcagggtcccatctgggccaagattcctcacacggacggcaacttccacccgtctccgctgatgggcggctttggcctgaaacatcctccgcctcagatcctgatcaagaacacgcctgtatctgcggatcctccgaccaccttcaaccagtcaaagctgaactctttcatcacgcaatacagcaccggacaggtcagcgtggaaattgaatgggagctgcagaaggaaaacagcaagcgctggaaccccgagatccagtacacctccaactactacaaatctacaagtgtggactttgctgttaatacagaaggcgtgtactctgaaccccgccccattggcacccgttacctcacccgtaatctgtaa

SEQ ID NO: 3874 - DNA, 2217 bp, Artificial Sequence
  Description of Artificial Sequence: Synthetic polynucleotide
atggctgccgatggttatcttccagattggctcgaggacaacctctctgagggcattcgcgagtggtgggcgctgaaacctggagccccgaagcccaaagccaaccagcaaaagcaggacgacggccggggtctggtgcttcctggctacaggtacctcggacccttcaacggactcgacaagggggagcccgtcaacgcggcggacgcggcggccctcgagcacgacaaggcctacgaccagcagctgcaggcgggtgacaatccgtacctgcggtataaccacgccgacgccgagtttcaggagcgtctgcaagaagatacgtcttttgggggcaacctcgggcgagcagtcttccaggccaagaagcgggttctcgaacctctcggtctggttgaggaaggcgctaagacggctcctggaaagaagagaccggtagagccatcaccccagcgttctccagactcctctacgggcatcggcaagaagggccaacagcccgccagaaaaagactcaattttggtcagactggcgactcagagtcagttccagaccctcaacctctcggagaacctccagcagcgccctctggtgtgggacctaatacaatggctgcaggcggtggcgcaccaatggcagacaataacgaaggcgccgacggagtgggtagttcctcgggaaattggcattgcgattccacatggctgggcgacagagtcatcaccaccagcacccgaacctgggccctgcccacctacaacaaccacctctacaagcaaatctccaacgggacatcgggaggagccaccaacgacaacacctacttcggctacagcaccccctgggggtattttgactttaacagattccactgccacttttcaccacgtgactggcagcgactcatcaacaacaactggggattccggcccaagagactcagcttcaagctcttcaacatccaggtcaaggaggtcacgcagaatgaaggcaccaagaccatcgccaataacctcaccagcaccatccaggtgtttacggactcggagtaccagctgccgtacgttctcggctctgcccaccagggctgcctgcctccgttcccggcggacgtgttcacgattccccagtacggctacctaacactcaacaacggtagtcaggccgtgggacgctcctccttctactgcctggaatactttccttcgcagatgctgagaaccggcaacaacttccagtttacttacaccttcgaggacgtgcctttccacagcagctacgcccacagccagagcttggaccggctgatgaatcctctgattgaccagtacctgtactacttgtctcggattcaaacaacaggaggcacggcaaatacgcagactctgggcttcagccaaggtgggcctaatacaatggccaatcaggcaaagaactggctgccaggaccctgttaccgccaacaacgcgtctcaacgacaaccgggcaaaacaacaatagcaactttgcctggactgctgggaccaaataccatctgaatggaagaaattcattggctaatcctggcatcgctatggcaacacacaaagacgacgaggagcgtttttttcccagtaacgggatcctgatttttggcaaacaaaatgctgccagagacaatgcggattacagcgatgtcatgcccaccagcgaggaagaaatcaaaaccactaaccctgtggccacagaggaatacggtatcgtggcagataacttgcagcagcaaaacacggctcctcaaattggaactgtcaacagccagggggccttacccggtatggtctggcagaaccgggacgtgtacctgcagggtcccatctgggccaagattcctcacacggacggcaacttccacccgtctccgctgatgggcggctttggcctgaaacatcctccgcctcagatcctgatcaagaacacgcctgtacctgcggatcctccgaccaccttcaaccagtcaaagctgaactctttcatcacgcaatacagcactggacaggtcagcgtggaaattgaatgggagctgcagaaggaaaacagcaagcgctggaaccccgagatccagtacacctccaactactacaaatctacaagtgtggactttgctgttaatacagaaggcgtgtactctgaaccccgccccattggcacccgttacctcacccgtaatctgtaa

SEQ ID NO: 3875 - DNA, 2217 bp, Artificial Sequence
  Description of Artificial Sequence: Synthetic polynucleotide
atggctgccgatggttatcttccagattggctcgaggacaacctctctgagggcattcgcgagtggtgggcgctgaaacctggagccccgaagcccaaagccaaccagcaaaagcaggacgacggccggggtctggtgcttcctggctacaagtacctcggacccttcaacggactcgacaagggggagcccgtcaacgcggcggacgcggcggccctcgagcacgacaaggcctacgaccagcagctgcaggcgggtgacaatccgtacctgcggtataaccacgccgacgccgagtttcaggagcgtctgcaagaagatacgtcttttgggggcaacctcgggcgagcagtcttccaggccaagaagcgggttctcgaacctctcggtctggttgaggaaggcgctaagacggctcctggaaagaagagaccggtagagccatcaccccagcgttctccagactcctctacgggcatcggcaagaagggccaacagcccgccagaaaaagactcaattttggtcagactggcgactcagagtcagttccagaccctcaacctctcggagaacctccagcagcgccctctggtgtgggacctaatacaatggctgcaggcggtggcgcaccaatggcagacaataacgaaggcgccgacggagtgggtagttcctcgggaaattggcattgcgattccacatggctgggcgacagagtcatcaccaccagcacccgaacctgggccctgcccacctacaacaaccacctctacaagcaaatctccaacgggacatcgggaggagccaccaacgacaacacctacttcggctacagcaccccctgggggtattttgactttaacagattccactgccacttttcaccacgtgactggcagcgactcatcaacaacaactggggattccggcccaagagactcagcttcaagctcttcaacatccaggtcaaggaggtcacgcagaatgaaggcaccaagaccatcgccaataacctcaccagcaccatccaggtgtttacggactcggagtaccagctgccgtacgttctcggctctgcccaccagggctgcctgcctccgttcccggcggacgtgttcacgattccccagtacggctacctaacactcaacaacggtagtcaggccgtgggacgctcctccttctactgcctggaatactttccttcgcagatgctgagaaccggcaacaacttccagtttacttacaccttcgaggacgtgcctttccacagcagctacgcccacagccagagcttggaccggctgatgaatcctctgattgaccagtacctgtactacttgtctcggattcaaacaacaggaggcacggcaaatacgcagactctgggcttcagccaaggtgggcctaatacaatggccaatcaggcaaagaactggctgccaggaccctgttaccgccaacaacgcgtctcaacgacaaccgggcaaaacaacaatagcaactttgcctggactgctgggaccaaataccgtctgaatggaagaaattcattggctaatcctggcatcgctatggcaacacacaaagacgacgaggagcgtttttttcccagtaacgggatcctgatttttggcaaacaaaatgctgccagagacaatgcggattacagcgatgtcatgcccaccagcgaggaagaaatcaaaaccactaaccctgtggccacagaggaatacggtatcgtggcagataacttgcagcagcaaaacacggctcctcaaattggaactgtcaacagccagggggccttacccggtatggtctggcagaaccgggacgtgtacctgcagggtcccatctgggccaagattcctcacacggacggcaacttccacccgtctccgctgatgggcggctttggcctgaaacatcctccgcctcagatcctgatcaagaacacgcctgtacctgcggatcctccgaccaccttcaaccagtcaaagctgaactctttcatcacgcaatacagcaccggacaggtcagcgtggaaattgaatgggagctgcagaaggaaaacagcaagcgctggaaccccgagatccagtacacctccaactactacaaatctacaagtgtggactttgctgttaatacagaaggcgtgtactctgaaccccgccccattggcacccgttacctcacccgtaatctgtaa

SEQ ID NO: 3876 - DNA, 2217 bp, Artificial Sequence
  Description of Artificial Sequence: Synthetic polynucleotide
atggctgccgatggttatcttccagattggctcgaggacaacctctctgagggcattcgcgagtggtgggcgctgaaacctggagccccgaagcccaaagccaaccagcaaaagcaggacgacggccggggtctggtgcttcctggctacaagtacctcggacccttcaacggactcgacaagggggagcccgtcaacgcggcggacgcggcggccctcgagcacgacaaggcctacgaccagcagctgcaggcgggtgacaatccgtacctgcggtataaccacgccgacgccgagtttcaggagcgtctgcaagaagatacgtcttttgggggcaacctcgggcgagcagtcttccaggccaagaagcgggttctcgaacctctcggtctggttgaggaaggcgctaagacggctcctggaaagaagagaccggtagagccatcaccccagcgttctccagactcctctacgggcatcggcaagaagggccaacagcccgccagaaaaagactcaattttggtcagactggcgactcagagtcagctccagaccctcaacctctcggagaacctccagcagcgccctctggtgtgggacctaatacaatggctgcaggcggtggcgcaccaatggcagacaataacgaaggcgccgacggagtgggtagttcctcgggaaattggcattgcgattccacatggctgggcgacagagtcatcaccaccagcacccgaacctgggccctgcccacctacaacaaccacctctacaagcaaatctccaacgggacatcgggaggagccaccaacgacaacacctacttcggctacagcaccccctgggggtattttgactttaacagattccactgccacttttcaccacgtgactggcagcgactcatcaacaacaactggggattccggcccaagagactcagcttcaagctcttcaacatccaggtcaaggaggtcacgcagaatgaaggcaccaagaccatcgccaataacctcaccagcaccatccaggtgtttacggactcggagtaccagctgccgtacgttctcggctctgcccaccagggctgcctgcctccgttcccggcggacgtgttcacgattccccagtacggctacctaacactcaacaacggtagtcaggccgtgggacgctcctccttctactgcctggaatactttccttcgcagatgctgagaaccggcaacaacttccagtttacttacaccttcgaggacgtgcctttccacagcagctacgcccacagccagagcttggaccggctgatgaatcctctgattgaccagtacctgtactacttgtctcggattcaaacaacaggaggcacggcaaatacgcagactctgggcttcagccaaggtgggcctaatacaatggccaatcaggcaaagaactggctgccaggaccctgttaccgccaacaacgcgtctcaacgacaaccgggcaaaacaacaatagcaactttgcctggactgctgggaccaaataccatctgaatggaagaaattcattggctaatcctggcatcgctatggcaacacacaaagacgacgaggagcgtttttttcccagtaacgggatcctgatttttggcaaacaaaatgctgccagagacaatgcggattacagcgatgtcatgcccaccagcgaggaagaaatcaaaaccactaaccctgtggccacagaggaatacggtatcgtggcagataacttgcagcagcaaaacacggctcctcaaattggaactgtcaacagccagggggccttacccggtatggtctggcagaaccgggacgtgtacctgcagggtcccatctgggccaagattcctcacacggacggcaacttccacccgtctccgctgatgggcggctttggcctgaaacatcctccgcctcagatcctgatcaagaacacgcctgtacctgcggatcctccgaccaccttcaaccagtcaaagctgaactctttcatcacgcaatacagcaccggacaggtcagcgtggaaattgaatgggagctgcagaaggaaaacagcaagcgctggaaccccgagatccagtacacctccaactactacaaatctacaagtgtggactttgctgttaatacagaaggcgtgtactctgaaccccgccccattggcacccgttacctcacccgtaatctgtaa

SEQ ID NO: 3877 - DNA, 2217 bp, Artificial Sequence
  Description of Artificial Sequence: Synthetic polynucleotide
atggctgccgatggttatcttccagattggctcgaggacaacctctctgagggcattcgcgagtggtgggcgctgaaacctggagccccgaagcccaaagccaaccagcaaaagcaggacgacggccggggtctggtgcttcctggctacaagtacctcggacccttcaacggactcgacaagggggagcccgtcaacgcggcggacgcggcggccctcgagcacgacaaggcctacgaccagcagctgcaggcgggtgacaatccgtacctgcggtataaccacgccgacgccgagtttcaggagcgtctgcaagaagatacgtcttttgggggcaacctcgggcgagcagtcttccaggccaagaagcgggttctcgaacctctcggtctggttgaggaaggcgctaagacggctcctggaaagaagagaccggtagagccatcaccccagcgttctccagacccctctacgggcatcggcaagaagggccaacagcccgccagaaaaagactcaattttggtcagactggcgactcagagtcagttccagaccctcaacctctcggagaacctccagcagcgccctctggtgtgggacctaatacaatggctgcaggcggtggcgcaccaatggcagacaataacgaaggcgccgacggagtgggtagttcctcgggaaattggcattgcgattccacatggctgggcgacagagtcatcaccaccagcacccgaacctgggccctgcccacctacaacaaccacctctacaagcaaatctccaacgggacatcgggaggagccaccaacgacaacacctacttcggctacagcaccccctgggggtattttgactttaacagattccactgccacttttcaccacgtgactggcagcgactcatcaacaacaactggggattccggcccaagagactcagcttcaagctcttcaacatccaggtcaaggaggtcacgcagaatgaaggcaccaagaccatcgccaataacctcaccagcaccatccaggtgtttacggactcggagtaccagctgccgtacgttctcggctctgcccaccagggctgcctgcctccgttcccggcggacgtgttcacgattccccagtacggctacctaacactcaacaacggtagtcaggccgtgggacgctcctccttctactgcctggaatactttccttcgcagatgctgagaaccggcaacaacttccagtttacttacaccttcgaggacgtgcctttccacagcagctacgcccacagccagagcttggaccggctgatgaatcctctgattgaccagtacctgtactacttgtctcggattcaaacaacaggaggcacggcaaatacgcagactctgggcttcagccaaggtgggcctaatacaatggccaatcaggcaaagaactggctgccaggaccctgttaccgccaacaacgcgtctcaacgacaaccgggcaaaacaacaatagcaactttgcctggactgctgggaccaaataccatctgaatggaagaaattcattggctaatcctggcatcgctatggcaacacacaaagacgacgaggagcgtttttttcccagtaacgggatcctgatttttggcaaacaaaatgctgccagagacaatgcggattacagcgatgtcatgcccaccagcgaggaagaaatcaaaaccactaaccctgtggccacagaggaatacggtatcgtggcagataacttgcagcagcaaaacacggctcctcaaattggaactgtcaacagccagggggccttacccggtatggtctggcagaaccgggacgtgtacctgcagggtcccatctgggccaagattcctcacacggacggcaacttccacccgtctccgctgatgggcggctttggcctgaaacatcctccgcctcagatcctgatcaagaacacgcctgtacctgcggatcctccgaccaccttcaaccagtcaaagctgaactctttcatcacgcaatacagcaccggacaggtcagcgtggaaattgaatgggagctgcagaaggaaaacagcaagcgctggaaccccgagatccagtacacctccaactactacaaatctacaagtgtggactttgctgttaatacagaaggcgtgtactctgaaccccgccccattggcacccgttacctcacccgtaatctgtaa

SEQ ID NO: 3878 - DNA, 2217 bp, Artificial Sequence
  Description of Artificial Sequence: Synthetic polynucleotide
atggctgccgatggttatcttccagattggctcgaggacaacctctctgagggcattcgcgagtggtgggcgctgaaacctggagccccgaagcccaaagccaaccagcaaaagcaggacgacggccggggtctggtgcttcctggctacaagtacctcggacccttcaacggactcgacaagggggagcccgtcaacgcggcggacgcggcggccctcgagcacgacaaggcctacgaccagcagctgcaggcgggtgacaatccgtacctgcggtataaccacgccgacgccgagtttcaggagcgtctgcaagaagatacgtcttttgggggcaacctcgggcgagcagtcttccaggccaagaagcgggttctcgaacctctcggtctggttgaggaaggcgctaagacggctcctggaaagaagagaccggtagagccatcaccccagcgttctccagactcctctacgggcatcggcaagaagggccaacagcccgccagaaaaagactcaattttggtcagactggcgactcagagtcagttccagaccctcaacctctcggagaacctccagcagcgccctctggtgtgggacctaatacaatggctgcaggcggtggcgcaccaatggcagacaataacgaaggcgccgacggagtgggtagttcctcgggaaattggcattgcgattccacatggctgggcgacagagtcatcaccaccagcacccgaacctgggccctgcccacctacaacaaccacctctacaagcaaatctccaacgggacatcgggaggagccaccaacgacaacacctacttcggctacagcaccccctgggggtattttgactttaacagattccactgccacttttcaccacgtgactggcagcgactcatcaacaacaactggggattccggcccaagagactcagcttcaagctcttcaacatccaggtcaaggaggtcacgcagaatgaaggcaccaagaccatcgccaataacctcaccagcaccatccaggtgtttacggactcggagtaccggctgccgtacgttctcggctctgcccaccagggctgcctgcctccgttcccggcggacgtgttcacgattccccagtacggctacctaacactcaacaacggtagtcaggccgtgggacgctcctccttctactgcctggaatactttccttcgcagatgctgagaaccggcaacaacttccagtttacttacaccttcgaggacgtgcctttccacagcagctacgcccacagccagagcttggaccggctgatgaatcctctgattgaccagtacctgtactacttgtctcggattcaaacaacaggaggcacggcaaatacgcagactctgggcttcagccaaggtgggcctaatacaatggccaatcaggcaaagaactggctgccaggaccctgttaccgccaacaacgcgtctcaacgacaaccgggcaaaacaacaatagcaactttgcctggactgctgggaccaaataccatctgaatggaagaaattcattggctaatcctggcatcgctatggcaacacacaaagacgacgaggagcgtttttttcccagtaacgggatcctgatttttggcaaacaaaatgctgccagagacaatgcggattacagcgatgtcatgcccaccagcgaggaagaaatcaaaaccactaaccctgtggccacagaggaatacggtatcgtggcagataacttgcagcagcaaaacacggctcctcaaattggaactgtcaacagccagggggccttacccggtatggtctggcagaaccgggacgtgtacctgcagggtcccatctgggccaagattcctcacacggacggcaacttccacccgtctccgctgatgggcggctttggcctgaaacatcctccgcctcagatcctgatcaagaacacgcctgtacctgcggatcctccgaccaccttcaaccagtcaaagctgaactctttcatcacgcaatacagcaccggacaggtcagcgtggaaattgaatgggagctgcagaaggaaaacagcaagcgctggaaccccgagatccagtacacctccaactactacaaatctacaagtgtggactttgctgttaatacagaaggcgtgtactctgaaccccgccccattggcacccgttacctcacccgtaatctgtaa

SEQ ID NO: 3879 - DNA, 2217 bp, Artificial Sequence
  Description of Artificial Sequence: Synthetic polynucleotide
atggctgccgatggttatcttccagattggctcgaggacaacctctctgagggcattcgcgagtggtgggcgctgaaacctggagccccgaagcccaaagccaaccagcaaaagcaggacgacggccggggtctggtgcttcctggctacaagtacctcggacccttcaacggactcgacaagggggagcccgtcaacgcggcggacgcggcggccctcgagcacgacaaggcctacgaccagcagctgcaggcgggtgacaatccgtacctgcggtataaccacgccgacgccgagtttcaggagcgtctgcaagaagatacgtcttttgggggcaacctcgggcgagcagtcttccaggccaagaagcgggttctcgaacctctcggtctggttgaggaaggcgctaagacggctcctggaaagaagagaccggtagagccatcaccccagcgttctccagactcctctacgggcatcggcaagaagggccaacagcccgccagaaaaagactcaattttggtcagactggcgactcagagtcagttccagaccctcaacctctcggagaacctccagcagcgccctctggtgtgggacctaatacaatggctgcaggcggtggcgcaccaatggcagacaataacgaaggcgccgacggagtgggtagttcctcgggaaattggcattgcgattccacatggctgggcgacagagtcatcaccaccagcacccgaacctgggccctgcccacctacaacaaccacctctacaagcaaatctccaacgggacatcgggaggagccaccaacgacaacacctacttcggctacagcaccccctgggggtattttgactttaacagattccactgccacttttcaccacgtgactggcagcgactcatcaacaacaactggggattccggcccaagagactcagcttcaagctcttcaacatccaggtcaaggaggtcacgcagaatgaaggcaccaagaccatcgccaataacctcaccagcaccatccaggtgtttacggactcggagtaccagctgccgtacgttctcggctctgcccaccagggctgcctgcctccgttcccggcggacgtgttcacgattccccagtacggctacctaacactcaacaacggtagtcaggccgtgggacgctcctccttctactgcctggaatactttccttcgcagatgctgagaaccggcaacaacttccagtttacttacaccttcgaggacgtgcctttccacagcagctacgcccacagccagagcttggaccggctgatgaatcctctgattgaccagtacctgtactacttgtctcggattcaaacaacaggaggcacggcaaatacgcagactctgggcttcagccaaggtgggcctaatacaatggccaatcaggcaaagaactggctgccaggaccctgttaccgccaacaacgcgtctcaacgacaaccgggcaaaacaacaatagcaactttgcctggactgctgggaccaaataccatctgaatggaagaaattcattggctaatcctggcatcgctatggcaacacacaaagacgacgaggagcgtttttttcccagtaacgggatcctgatttttggcaaacaaaatgctgccagagacaatgcggattacagcgatgtcatgcccaccagcgaggaagaaatcaaaaccactaaccctgtggccacagaggaatacggtatcgtggcagataacttgcagcagcaaaacacggctcctcaaattggaactgtcaacagccagggggccttacccggtatggtctggcagaaccgggacgtgtacctgcagggtcccatctgggccaagattcctcacacggacggcaacttccacccgtctccgctgatgggcggctttggcctgaaacatcctccgcctcagatcctgatcaagaacacgcctgtacctgcggatcctccgaccaccttcaaccagccaaagctgaactctttcatcacgcaatacagcaccggacaggtcagcgtggaaattgaatgggagctgcagaaggaaaacagcaagcgctggaaccccgagatccagtacacctccaactactacaaatctacaagtgtggactttgctgttaatacagaaggcgtgtactctgaaccccgccccattggcacccgttacctcacccgtaatctgtaa

SEQ ID NO: 3880 - DNA, 2217 bp, Artificial Sequence
  Description of Artificial Sequence: Synthetic polynucleotide
atggctgccgatggttatcttccagattggctcgaggacaacctctctgagggcattcgcgagtggtgggcgctgaaacctggagccccgaagcccaaagccaaccagcaaaagcaggacgacggccggggtctggtgcttcctggctacaagtacctcggacccttcaacggactcgacaagggggagcccgtcaacgcggcggacgcggcggccctcgagcacgacaaggcctacgaccagcagctgcaggcgggtggcaatccgtacctgcggtataaccacgccgacgccgagtttcaggagcgtctgcaagaagatacgtcttttgggggcaacctcgggcgagcagtcttccaggccaagaagcgggttctcgaacctctcggtctggttgaggaaggcgctaagacggctcctggaaagaagagaccggtagagccatcaccccagcgttctccagactcctctacgggcatcggcaagaagggccaacagcccgccagaaaaagactcaattttggtcagactggcgactcagagtcagttccagaccctcaacctctcggagaacctccagcagcgccctctggtgtgggacctaatacaatggctgcaggcggtggcgcaccaatggcagacaataacgaaggcgccgacggagtgggtagttcctcgggaaattggcattgcgattccacatggctgggcgacagagtcatcaccaccagcacccgaacctgggccctgcccacctacaacaaccacctctacaagcaaatctccaacgggacatcgggaggagccaccaacgacaacacctacttcggctacagcaccccctgggggtattttgactttaacagattccactgccacttttcaccacgtgactggcagcgactcatcaacaacaactggggattccggcccaagagactcagcttcaagctcttcaacatccaggtcaaggaggtcacgcagaatgaaggcaccaagaccatcgccaataacctcaccagcaccatccaggtgtttacggactcggagtaccagctgccgtacgttctcggctctgcccaccagggctgcctgcctccgttcccggcggacgtgttcacgattccccagtacggctacctaacactcaacaacggtagtcaggccgtgggacgctcctccttctactgcctggaatactttccttcgcagatgctgagaaccggcaacaacttccagtttacttacaccttcgaggacgtgcctttccacagcagctacgcccacagccagagcttggaccggctgatgaatcctctgattgaccagtacctgtactacttgtctcggattcaaacaacaggaggcacggcaaatacgcagactctgggcttcagccaaggtgggcctaatacaatggccaatcaggcaaagaactggctgccaggaccctgttaccgccaacaacgcgtctcaacgacaaccgggcaaaacaacaatagcaactttgcctggactgctgggaccaaataccatctgaatggaagaaattcattggctaatcctggcatcgctatggcaacacacaaagacgacgaggagcgtttttttcccagtaacgggatcctgatttttggcaaacaaaatgctgccagagacaatgcggattacagcgatgtcatgcccaccagcgaggaagaaatcaaaaccactaaccctgtggccacagaggaatacggtatcgtggcagataacttgcagcagcaaaacacggctcctcaaattggaactgtcaacagccagggggccttacccggtatggtctggcagaaccgggacgtgtacctgcagggtcccatctgggccaagattcctcacacggacggcaacttccacccgtctccgctgatgggcggctttggcctgaaacatcctccgcctcagatcctgatcaagaacacgcctgtacctgcggatcctccgaccaccttcaaccagtcaaagctgaactctttcatcacgcaatacagcaccggacaggtcagcgtggaaattgaatgggagctgcagaaggaaaacagcaagcgctggaaccccgagatccagtacacctccaactactacaaatctacaagtgtggactttgctgttaatacagaaggcgtgtactctgaaccccgccccattggcacccgttacctcacccgtaatctgtaa

SEQ ID NO: 3881 - DNA, 2217 bp, Artificial Sequence
  Description of Artificial Sequence: Synthetic polynucleotide
atggctgccgatggttatcttccagattggctcgaggacaacctctctgagggcattcgcgagtggtgggcgctgaaacctggagccccgaagcccaaagccaaccagcaaaagcaggacgacggccggggtctggtgcttcctggctacaagtacctcggacccttcaacggactcgacaagggggagcccgtcaacgcggcggacgcggcggccctcgagcacgacaaggcctacgaccagcagctgcaggcgggtgacaatccgtacctgcggtataaccacgccgacgccgagtttcaggagcgtctgcaagaagatacgtcttttgggggcaacctcgggcgagcagtcttccaggccaagaagcgggttctcgaacctctcggtctggttgaggaaggcgctaagacggctcctggaaagaagagaccggtagagccatcaccccagcgttctccagactcctctacgggcatcggcaagaagggccaacagcccgccagaaaaagactcaattttggtcagactggcgactcagagtcagttccagaccctcaacctctcggagaacctccagcagcgccctctggtgtgggacctaatacaatggctgcaggcggtggcgcaccaatggcagacaataacgaaggcgccgacggagtgggtagttcctcgggaaattggcattgcgattccacatggctgggcgacagagtcatcaccaccagcacccgaacctgggccctgcccacctacaacaaccacctctacaagcaaatctccaacgggacatcgggaggagccaccaacgacaacacctacttcggctacagcaccccctgggggtattttgactttaacagattccactgccacttttcaccacgtgactggcagcgactcatcaacaacaactggggattccggcccaagagactcagcttcaagctcttcaacatccaggtcaaggaggtcacgcagaatgaaggcaccaagaccatcgccaataacctcaccagcaccatccaggtgtttacggactcggagtaccagctgccgtacgttctcggctctgcccaccagggctgcctgcctccgttcccggcggacgtgttcacgattccccagtacggctacctaacactcaacaacggtagtcaggccgtgggacgctcctccttctactgcctggaatactttccttcgcagatgctgagaaccggcaacaacttccagtttacttacaccttcgaggacgtgcctttccacagcagctacgcccacagccagagcttggaccggctgatgaatcctctgattgaccagtacctgtactacttgtctcggattcaaacaacaggaggcacggcaaatacgcagactctgggcttcagccaaggtgggcctaatacaatggccaatcaggcaaagaactggctgccaggaccctgttaccgccaacaacgcgtctcaacggcaaccgggcaaaacaacaatagcaactttgcctggactgctgggaccaaataccatctgaatggaagaaattcattggctaatcctggcatcgctatggcaacacacaaagacgacgaggagcgtttttttcccagtaacgggatcctgatttttggcaaacaaaatgctgccagagacaatgcggattacagcgatgtcatgcccaccagcgaggaagaaatcaaaaccactaaccctgtggccacagaggaatacggtatcgtggcagataacttgcagcagcaaaacacggctcctcaaattggaactgtcaacagccagggggccttacccggtatggtctggcagaaccgggacgtgtacctgcagggtcccatctgggccaagattcctcacacggacggcaacttccacccgtctccgctgatgggcggctttggcctgaaacatcctccgcctcagatcctgatcaagaacacgcctgtacctgcggatcctccgaccaccttcaaccagtcaaagctgaactctttcatcacgcaatacagcaccggacaggtcagcgtggaaattgaatgggagctgcagaaggaaaacagcaagcgctggaaccccgagatccagtacacctccaactactacaaatctacaagtgtggactttgctgttaatacagaaggcgtgtactctgaaccccgccccattggcacccgttacctcacccgtaatctgtaa

SEQ ID NO: 3882 - DNA, 2217 bp, Artificial Sequence
  Description of Artificial Sequence: Synthetic polynucleotide
atggctgccgatggttatcttccagattggctcgaggacaacctctctgagggcattcgcgagtggtgggcgctgaaacctggagccccgaagcccaaagccaaccagcaaaagcaggacgacggccggggtctggtgcttcctggctacaagtacctcggacccttcaacggactcgacaagggggagcccgtcaacgcggcggacgcggcggccctcgagcacgacaaggcctacgaccagcagctgcaggcgggtgacaatccgtacctgcggtataaccacgccgacgccgagtttcaggagcgtctgcaagaagatacgtcttttgggggcaacctcgggcgagcagtcttccaggccaagaagcgggttctcgaacctctcggtctggttgaggaaggcgctaagacggctcctggaaagaagagaccggtagagccatcaccccagcgttctccagactcctctacgggcatcggcaagaagggccaacagcccgccagaaaaagactcaattttggtcagactggcgactcagagtcagttccagaccctcaacctctcggagaacctccagcagcgccctctggtgtgggacctaatacaatggctgcaggcggtggcgcaccaatggcagacaataacgaaggcgccgacggagtgggtagttcctcgggaaattggcattgcgattccacatggctgggcgacagagtcatcaccaccagcacccgaacctgggccctgcccacctacaacaaccacctctacaagcaaatctccaacgggacatcgggaggagccaccaacgacaacacctacttcggctacagcaccccctgggggtattttgactttaacagattccactgccacttttcaccacgtgactggcagcgactcatcaacaacaactggggattccggcccaagagactcagcttcaagctcttcaacatccaggtcaaggaggtcacgcagaatgaaggcaccaagaccatcgccaataacctcaccagcaccatccaggtgtttacggactcggagtaccagctgccgtacgttctcggctctgcccaccagggctgcccgcctccgttcccggcggacgtgttcacgattccccagtacggctacctaacactcaacaacggtagtcaggccgtgggacgctcctccttctactgcctggaatactttccttcgcagatgctgagaaccggcaacaacttccagtttacttacaccttcgaggacgtgcctttccacagcagctacgcccacagccagagcttggaccggctgatgaatcctctgattgaccagtacctgtactacttgtctcggattcaaacaacaggaggcacggcaaatacgcagactctgggcttcagccaaggtgggcctaatacaatggccaatcaggcaaagaactggctgccaggaccctgttaccgccaacaacgcgtctcaacgacaaccgggcaaaacaacaatagcaactttgcctggactgctgggaccaaataccatctgaatggaagaaattcattggctaatcctggcatcgctatggcaacacacaaagacgacgaggagcgtttttttcccagtaacgggatcctgatttttggcaaacaaaatgctgccagagacaatgcggattacagcgatgtcatgcccaccagcgaggaagaaatcaaaaccactaaccctgtggccacagaggaatacggtatcgtggcagataacttgcagcagcaaaacacggctcctcaaattggaactgtcaacagccagggggccttacccggtatggtctggcagaaccgggacgtgtacctgcagggtcccatctgggccaagattcctcacacggacggcaacttccacccgtctccgctgatgggcggctttggcctgaaacatcctccgcctcagatcctgatcaagaacacgcctgtacctgcggatcctccgaccaccttcaaccagtcaaagctgaactctttcatcacgcaatacagcaccggacaggtcagcgtggaaattgaatgggagctgcagaaggaaaacagcaagcgctggaaccccgagatccagtacacctccaactactacaaatctacaagtgtggactttgctgttaatacagaaggcgtgtactctgaaccccgccccattggcacccgttacctcacccgtaatctgtaa

SEQ ID NO: 3883 - DNA, 2217 bp, Artificial Sequence
  Description of Artificial Sequence: Synthetic polynucleotide
atggctgccgatggttatcttccagattggctcgaggacaacctctctgagggcattcgcgagtggtgggcgctgaaacctggagccccgaagcccaaagccaaccagcaaaagcaggacgacggccggggtctggtgcttcctggctacaagtacctcggacccttcaacggactcgacaagggggagcccgtcaacgcggcggacgcggcggccctcgagcacgacaaggcctacgaccagcagccgcaggcgggtgacaatccgtacctgcggtataaccacgccgacgccgagtttcaggagcgtctgcaagaagatacgtcttttgggggcaacctcgggcgagcagtcttccaggccaagaagcgggttctcgaacctctcggtctggttgaggaaggcgctaagacggctcctggaaagaagagaccggtagagccatcaccccagcgttctccagactcctctacgggcatcggcaagaagggccaacagcccgccagaaaaagactcaattttggtcagactggcgactcagagtcagttccagaccctcaacctctcggagaacctccagcagcgccctctggtgtgggacctaatacaatggctgcaggcggtggcgcaccaatggcagacaataacgaaggcgccgacggagtgggtagttcctcgggaaattggcattgcgattccacatggctgggcgacagagtcatcaccaccagcacccgaacctgggccctgcccacctacaacaaccacctctacaagcaaatctccaacgggacatcgggaggagccaccaacgacaacacctacttcggctacagcaccccctgggggtattttgactttaacagattccactgccacttttcaccacgtgactggcagcgactcatcaacaacaactggggattccggcccaagagactcagcttcaagctcttcaacatccaggtcaaggaggtcacgcagaatgaaggcaccaagaccatcgccaataacctcaccagcaccatccaggtgtttacggactcggagtaccagctgccgtacgttctcggctctgcccaccagggctgcctgcctccgttcccggcggacgtgttcacgattccccagtacggctacctaacactcaacaacggtagtcaggccgtgggacgctcctccttctactgcctggaatactttccttcgcagatgctgagaaccggcaacaacttccagtttacttacaccttcgaggacgtgcctttccacagcagctacgcccacagccagagcttggaccggctgatgaatcctctgattgaccagtacctgtactacttgtctcggattcaaacaacaggaggcacggcaaatacgcagactctgggcttcagccaaggtgggcctaatacaatggccaatcaggcaaagaactggctgccaggaccctgttaccgccaacaacgcgtctcaacgacaaccgggcaaaacaacaatagcaactttgcctggactgctgggaccaaataccatctgaatggaagaaattcattggctaatcctggcatcgctatggcaacacacaaagacgacgaggagcgtttttttcccagtaacgggatcctgatttttggcaaacaaaatgctgccagagacaatgcggattacagcgatgtcatgcccaccagcgaggaagaaatcaaaaccactaaccctgtggccacagaggaatacggtatcgtggcagataacttgcagcagcaaaacacggctcctcaaattggaactgtcaacagccagggggccttacccggtatggtctggcagaaccgggacgtgtacctgcagggtcccatctgggccaagattcctcacacggacggcaacttccacccgtctccgctgatgggcggctttggcctgaaacatcctccgcctcagatcctgatcaagaacacgcctgtacctgcggatcctccgaccaccttcaaccagtcaaagctgaactctttcatcacgcaatacagcaccggacaggtcagcgtggaaattgaatgggagctgcagaaggaaaacagcaagcgctggaaccccgagatccagtacacctccaactactacaaatctacaagtgtggactttgctgttaatacagaaggcgtgtactctgaaccccgccccattggcacccgttacctcacccgtaatctgtaa

SEQ ID NO: 3884 - DNA, 2217 bp, Artificial Sequence
  Description of Artificial Sequence: Synthetic polynucleotide
atggctgccgatggttatcttccagattggctcgaggacaacctctctgagggcattcgcgagtggtgggcgctgaaacctggagccccgaagcccaaagccaaccagcaaaagcaggacgacggccggggtctggtgcttcctggctacaagtacctcggacccttcaacggactcgacaagggggagcccgtcaacgcggcggacgcggcggccctcgagcacgacaaggcctacgaccagcagctgcaggcgggtgacaatccgtacctgcggtataaccacgccgacgccgagtttcaggagcgtctgcaagaagatacgtcttttgggggcaacctcgggcgagcagtcttccaggccaagaagcgggttctcgaacctctcggtctggttgaggaaggcgctaagacggctcctggaaagaagagaccggtagagccatcaccccagcgttctccagactcctctacgggcatcggcaagaagggccaacagcccgccagaaaaagactcaattttggtcagactggcgactcagagtcagttccagaccctcaacctctcggagaacctccagcagcgccctctggtgtgggacctaatacaatggctgcaggcggtggcgcaccaatggcagacaataacgaaggcgccgacggagtgggtagttcctcgggaaattggcattgcgattccacatggctgggcgacagagtcatcaccaccagcacccgaacctgggccctgcccacctacaacaaccacctctacaagcaaatctccaacgggacatcgggaggagccaccaacgacaacacctacttcggctacagcaccccctgggggtattttgactttaacagattccactgccacttttcaccacgtgactggcagcgactcatcaacaacaactggggattccggcccaagagactcagcttcaagctcttcaacatccaggtcaaggaggtcacgcagaatgaaggcaccaagaccatcgccaataacctcaccagcaccatccaggtgtttacggactcggagtaccagctgccgtacgttctcggctctgcccaccagggctgcctgcctccgttcccggcggacgtgttcacgattccccagtacggctacctaacactcaacaacggtagtcaggccgtgggacgctcctccttctactgcctggaataccttccttcgcagatgctgagaaccggcaacaacttccagtttacttacaccttcgaggacgtgcctttccacagcagctacgcccacagccagagcttggaccggctgatgaatcctctgattgaccagtacctgtactacttgtctcggattcaaacaacaggaggcacggcaaatacgcagactctgggcttcagccaaggtgggcctaatacaatggccaatcaggcaaagaactggctgccaggaccctgttaccgccaacaacgcgtctcaacgacaaccgggcaaaacaacaatagcaactttgcctggactgctgggaccaaataccatctgaatggaagaaattcattggctaatcctggcatcgctatggcaacacacaaagacgacgaggagcgtttttttcccagtaacgggatcctgatttttggcaaacaaaatgctgccagagacaatgcggattacagcgatgtcatgcccaccagcgaggaagaaatcaaaaccactaaccctgtggccacagaggaatacggtatcgtggcagataacttgcagcagcaaaacacggctcctcaaattggaactgtcaacagccagggggccttacccggtatggtctggcagaaccgggacgtgtacctgcagggtcccatctgggccaagattcctcacacggacggcaacttccacccgtctccgctgatgggcggctttggcctgaaacatcctccgcctcagatcctgatcaagaacacgcctgtacctgcggatcctccgaccaccttcaaccagtcaaagctgaactctttcatcacgcaatacagcaccggacaggtcagcgtggaaattgaatgggagctgcagaaggaaaacagcaagcgctggaaccccgagatccagtacacctccaactactacaaatctacaagtgtggactttgctgttaatacagaaggcgtgtactctgaaccccgccccattggcacccgttacctcacccgtaatctgtaa

SEQ ID NO: 3885 - DNA, 2217 bp, Artificial Sequence
  Description of Artificial Sequence: Synthetic polynucleotide
atggctgccgatggttatcttccagattggctcgaggacaacctctctgagggcattcgcgagtggtgggcgctgaaacctggagccccgaagcccaaagccaaccagcaaaagcaggacgacggccggggtctggtgcttcctggctacaagtacctcggacccttcaacggactcgacaagggggagcccgtcaacgcggcggacgcggcggccctcgagcacgacaaggcctacgaccagcagctgcgggcgggtgacaatccgtacctgcggtataaccacgccgacgccgagtttcaggagcgtctgcaagaagatacgtcttttgggggcaacctcgggcgagcagtcttccaggccaagaagcgggttctcgaacctctcggtctggttgaggaaggcgctaagacggctcctggaaagaagagaccggtagagccatcaccccagcgttctccagactcctctacgggcatcggcaagaaggaccaacagcccgccagaaaaagactcaattttggtcagactggcgactcagagtcagttccagaccctcaacctctcggagaacctccagcagcgccctctggtgtgggacctaatacaatggctgcaggcggtggcgcaccaatggcagacaataacgaaggcgccgacggagtgggtagttcctcgggaaattggcattgcgattccacatggctgggcgacagagtcatcaccaccagcacccgaacctgggccctgcccacctacaacaaccacctctacaagcaaatctccaacgggacatcgggaggagccaccaacgacaacacctacttcggctacagcaccccctgggggtattttgactttaacagattccactgccacttttcaccacgtgactggcagcgactcatcaacaacaactggggattccggcccaagagactcagcttcaagctcttcaacatccaggtcaaggaggtcacgcagaatgaaggcaccaagaccatcgccaataacctcaccagcaccatccaggtgtttacggactcggagtaccagctgccgtacgttctcggctctgcccaccagggctgcctgcctccgttcccggcggacgtgttcacgattccccagtacggctacctaacactcaacaacggtagtcaggccgtgggacgctcctccttctactgcctggaatactttccttcgcagatgctgagaaccggcaacaacttccagtttacttacaccttcgaggacgtgcctttccacagcagctacgcccacagccagagcttggaccggctgatgaatcctctgattgaccagtacctgtactacttgtctcggattcaaacaacaggaggcacggcaaatacgcagactctgggcttcagccaaggtgggcctaatacaatggccaatcaggcaaagaactggctgccaggaccctgttaccgccaacaacgcgtctcaacgacaaccgggcaaaacaacaatagcaactttgcctggactgctgggaccaaataccatctgaatggaagaaattcattggctaatcctggcatcgctatggcaacacacaaagacgacgaggagcgtttttttcccagtaacgggatcctgatttttggcaaacaaaatgctgccagagacaatgcggattacagcgatgtcatgcccaccagcgaggaagaaatcaaaaccactaaccctgtggccacagaggaatacggtatcgtggcagataacttgcagcagcaaaacacggctcctcaaattggaactgtcaacagccagggggccttacccggtatggtctggcagaaccgggacgtgtacctgcagggtcccatctgggccaagattcctcacacggacggcaacttccacccgtctccgctgatgggcggctttggcctgaaacatcctccgcctcagatcctgatcaagaacacgcctgtacctgcggatcctccgaccaccttcaaccagtcaaagctgaactctttcatcacgcaatacagcaccggacaggtcagcgtggaaattgaatgggagctgcagaaggaaaacagcaagcgctggaaccccgagatccagtacacctccaactactacaaatctacaagtgtggactttgctgttaatacagaaggcgtgtactctgaaccccgccccattggcacccgttacctcacccgtaatctgtaa

SEQ ID NO: 3886 - DNA, 2217 bp, Artificial Sequence
  Description of Artificial Sequence: Synthetic polynucleotide
atggctgccgatggttatcttccagattggctcgaggacaacctctctgagggcattcgcgagtggtgggcgctgaaacctggagccccgaagcccaaagccaaccagcaaaagcaggacgacggccggggtctggtgcttcctggctacaagtacctcggacccttcaacggactcgacaagggggagcccgtcaacgcggcggacgcggcggccctcgagcacgacaaggcctacgaccagcagctgcaggcgggtgacaatccgtacctgcggtataaccacgccgacgccgagtttcaggagcgtctgcaagaagatacgtcttttgggggcaacctcgggcgagcagtcttccaggccaagaagcgggttctcgaacctctcggtctggttgaggaaggcgctaagacggctcctggaaagaagagaccggtagagccatcaccccagcgttctccagactcctctacgggcatcggcaagaagggccaacagcccgccagaaaaagactcaattttggtcagactggcgactcagagtcagttccagaccctcaacctctcggagaacctccagcagcgccctctggtgtgggacctaatacaatggctgcaggcggtggcgcaccaatggcagacaataacgaaggcgccgacggagtgggtagttcctcgggaaattggcattgcgattccacatggctgggcgacagagtcatcaccaccagcacccgaacctgggccctgcccacctacaacaaccacctctacaagcaaatctccaacgggacatcgggaggagccaccaacgacaacacctacttcggctacagcaccccctgggggtattttgactttaacagattccactgccacttttcaccacgtgactggcagcgactcatcaacaacaactggggattccggcccaagagactcagcttcaagctcttcaacatccaggtcaaggaggtcacgcagaatgaaggcaccaagaccatcgccaataacctcaccagcaccatccaggtgtttacggactcggagtaccagctgccgtacgttctcggctctgcccaccagggctgcctgcctccgttcccggcggacgtgttcacgattccccagtacggctacctaacactcaacaacggtagtcaggccgtgggacgctcctccttctactgcctggaatactttccttcgcagatgctgagaaccggcaacaacttccagtttacttacaccttcgaggacgtgcctttccacagcagctacgcccacagccagagcttggaccggctgatgaatcctctgattgaccagtacctgtactacttgtctcggattcaaacaacaggaggcacggcaaatacgcagactctgggcttcagccaaggtgggcctaatacaatggccaatcaggcaaagaactggctgccaggaccctgttaccgccaacaacgcgtctcaacgacaaccgggcaaaacaacaatagcaactttgcctggactgctgggaccaaataccatctgaatggaagaaattcattggctaatcctggcatcgctatggcaacacacaaagacgacgaggagcgtttttttcccagtaacgggatcctgatttttggcaaacaaaatgctgccagagacaatgcggattacagcgatgtcatgcccaccagcgaggaagaaatcaaaaccactaaccctgtggccacagaggaatacggtatcgtggcagataacttgcagcagcaaaacacggctcctcaaattggaactgtcaacagccagggggccttacccggtatggtctggcagaaccgggacgtgtacctgcagggtcccatctgggccaagattcctcgcacggacggcaacttccacccgtctccgctgatgggcggctttggcctgaaacatcctccgcctcagatcctgatcaagaacacgcctgtgcctgcggatcctccgaccaccttcaaccagtcaaagctgaactctttcatcacgcaatacagcaccggacaggtcagcgtggaaattgaatgggagctgcagaaggaaaacagcaagcgctggaaccccgagatccagtacacctccaactactacaaatctacaagtgtggactttgctgttaatacagaaggcgtgtactctgaaccccgccccattggcacccgttacctcacccgtaatctgtaa

SEQ ID NO: 3887 - DNA, 2217 bp, Artificial Sequence
  Description of Artificial Sequence: Synthetic polynucleotide
atggctgccgatggttatcttccagattggctcgaggacaacctctctgagggcattcgcgagtggtgggcgctgaaacctggagccccgaagcccaaagccaaccagcaaaagcaggacgacggccggggtctggtgcttcctggctacaagtacctcggacccttcaacggactcgacaagggggagcccgtcaacgcggcggacgcggcggccctcgagcacgacaaggcctacgaccagcagctgcaggcgggtgacaatccgtacctgcggtataaccacgccgacgccgagtttcaggagcgtctgcaagaagatacgtcttttgggggcaacctcgggcgagcagtcttccaggccaagaagcgggttctcgaacctctcggtctggttgaggaaggcgctaagacggctcctggaaagaagagaccggtagagccatcaccccagcgttctccagactcctctacgggcatcggcaagaagggccaacagcccgccagaaaaagactcaattttggtcagactggcgactcagagtcagttccagaccctcaacctctcggagaacctccagcagcgccctctggtgtgggacctaatacaatggctgcaggcggtggcgcaccaatggcagacaataacgaaggcgccgacggagtgggtagttcctcgggaaattggcattgcgattccacatggctgggcgacagagtcatcaccaccagcacccgaacctgggccctgcccacctacaacaaccacctctacaagcaaatctccaacgggacatcgggaggagccaccaacgacaacacctacttcggctacagcaccccctgggggtattttgactttaacagattccactgccacttttcaccacgtgactggcagcgactcatcaacaacaactggggattccggcccaagagactcagcttcaagctcttcaacatccaggtcaaggaggtcacgcagaatgaaggcaccaagaccatcgccaataacctcaccagcaccatccaggtgtttacggactcggagtaccagctgccgtacgttctcggctctgcccaccagggctgcctgcctccgttcccggcggacgtgttcacgattccccagtacggctacctaacactcaacaacggtagtcaggccgtgggacgctcctccttctactgcctggaatactttccttcgcagatgctgagaaccggcaacaacttccagtttacttacaccttcgaggacgtgcctttccacagcagctacgcccacagccagagcttggaccggctgatgaatcctctgattgaccagtacctgtactacttgtctcggattcaaacaacaggaggcacggcaaatacgcagactctgggcttcagccaaggtgggcctaatacaatggccaatcaggcaaagaactggctgccaggaccctgttaccgccaacaacgcgtctcaacgacaaccgggcaaaacaacaatagcaactttgcctggactgctgggaccaaataccatctgaatggaagaaattcattggctaatcctggcatcgctatggcaacacacaaagacgacgaggagcgtttttttcccagtaacgggatcctgatttttggcaaacaaaatgctgccagagacaatgcggattacagcgatgtcatgcccaccagcgaggaagaaatcaaaaccactaaccctgtggccacagaggaatacggtatcgtggcagataacttgcagcagcaaaacacggctcctcaaattggaactgtcaacagccagggggccttacccggtatggtctggcagaaccgggacgtgtacctgcagggtcccatctgggccaagattcctcacacggacggcaacttccacccgtctccgctgatgggcggctttggcctgaaacatcctccgcctcagatcctgatcaagaacacgcctgtacctgcggatcctccgaccaccttcaaccagtcaaagctgaactctttcatcacgcaatacagcaccggacaggtcagcgtggaaattggatgggagctgcagaaggaaaacagcaagcgctggaaccccgagatccagtacacctccaactactacaaatctacaagtgtggactttgctgttaatacagaaggcgtgtactctgaaccccgccccattggcacccgttacctcacccgtaatctgtaa

SEQ ID NO: 3888 - DNA, 2217 bp, Artificial Sequence
  Description of Artificial Sequence: Synthetic polynucleotide
atggctgccgatggttatcttccagattggctcgaggacaacctctctgagggcattcgcgagtggtgggcgctgaaacctggagccccgaagcccaaagccaaccagcaaaagcaggacgacggccggggtctggtgcttcctggctacaagtacctcggacccttcaacggactcgacaagggggagcccgtcaacgcggcggacgcggcggccctcgagcacgacaaggcctacgaccagcagctgcaggcgggtgacaatccgtacctgcggtataaccacgccgacgccgagtttcaggagcgtctgcaagaagatacgtcttttgggggcaacctcgggcgagcagtcttccaggccaagaagcgggttctcgaacctctcggtctggttgaggaaggcgctaagacggctcctggaaagaagagaccggtagagccatcaccccagcgttctccagactcctctacgggcatcggcaagaagggccaacagcccgccagaaaaagactcaattttggtcagactggcgactcagagtcagttccagaccctcaacctctcggagaacctccagcagcgccctctggtgtgggacctaatacaatggctacaggcggtggcgcaccaatggcagacaataacgaaggcgccgacggagtgggtagttcctcgggaaattggcattgcgattccacatggctgggcgacagagtcatcaccaccagcacccgaacctgggccctgcccacctacaacaaccacctctacaagcaaatctccaacgggacatcgggaggagccaccaacgacaacacctacttcggctacagcaccccctgggggtattttgactttaacagattccactgccacttttcaccacgtgactggcagcgactcatcaacaacaactggggattccggcccaagagactcagcttcaagctcttcaacatccaggtcaaggaggtcacgcagaatgaaggcaccaagaccatcgccaataacctcaccagcaccatccaggtgtttacggactcggagtaccagctgccgtacgttctcggctctgcccaccagggctgcctgcctccgttcccggcggacgtgttcacgattccccagtacggctacctaacactcaacaacggtagtcaggccgtgggacgctcctccttctactgcctggaatactttccttcgcagatgctgagaaccggcaacaacttccagtttacttacaccttcgaggacgtgcctttccacggcagctacgcccacagccagagcttggaccggctgatgaatcctctgattgaccagtacctgtactacttgtctcggattcaaacaacaggaggcacggcaaatacgcagactctgggcttcagccaaggtgggcctaatacaatggccaatcaggcaaagaactggctgccaggaccctgttaccgccaacaacgcgtctcaacgacaaccgggcaaaacaacaatagcaactttgcctggactgctgggaccaaataccatctgaatggaagaaattcattggctaatcctggcatcgctatggcaacacacaaagacgacgaggagcgtttttttcccagtaacgggatcctgatttttggcaaacaaaatgctgccagagacaatgcggattacagcgatgtcatgcccaccagcgaggaagaaatcaaaaccactaaccctgtggccacagaggaatacggtatcgtggcagataacttgcagcagcaaaacacggctcctcaaattggaactgtcaacagccagggggccttacccggtatggtctggcagaaccgggacgtgtacctgcagggtcccatctgggccaagattcctcacacggacggcaacttccacccgtctccgctgatgggcggctttggcctgaaacatcctccgcctcagatcctgatcaagaacacgcctgtacctgcggatcctccgaccaccttcaaccagtcaaagctgaactctttcatcacgcaatacagcaccggacaggtcagcgtggaaattgaatgggagctgcagaaggaaaacagcaagcgctggaaccccgagatccagtacacctccaactactacaaatctacaagtgtggactttgctgttaatacagaaggcgtgtactctgaaccccgccccattggcacccgttacctcacccgtaatctgtaa

SEQ ID NO: 3889 - DNA, 2217 bp, Artificial Sequence
  Description of Artificial Sequence: Synthetic polynucleotide
atggctgccgatggttatcttccagattggctcgaggacaacctctctgagggcattcgcgagtggtgggcgctgaaacctggagccccgaagcccaaagccaaccagcaaaagcaggacgacggccggggtctggtgcttcctggctacaagtacctcggacccttcaacggactcgacaagggggagcccgtcaacgcggcggacgcggcggccctcgagcacgacaaggcctacgaccagcagctgcaggcgggtgacaatccgtacctgcggtataaccacgccgacgccgagtttcaggagcgtctgcaagaagatacgtcttttgggggcaacctcgggcgagcagtcttccaggccaagaagcgggttctcgaacctctcggtctggttgaggaaggcgctaagacggctcctggaaagaagagaccggtagagccatcaccccagcgttctccagactcctctacgggcatcggcaagaagggccaacagcccgccagaaaaagactcaattttggtcagactggcgactcagagtcagttccagaccctcaacctctcggagaacctccagcagcgccctctggtgtgggacctaatacaatggctgcaggcggtggcgcaccaatggcagacaataacgaaggcgccgacggagtgggtagttcctcgggaaattggcattgcgattccacatggctgggcgacagagtcatcaccaccagcacccgaacctgggccctgcccacctacaacaaccacctctacaagcaaatctccaacgggacatcgggaggagccaccaacgacaacacctacttcggctacagcaccccctgggggtattttgactttaacagattccactgccacttttcaccacgtgactggcagcgactcatcaacaacaactggggattccggcccaagagactcagcttcaagctcttcaacatccaggtcaaggaggtcacgcagaatgaaggcaccaagaccatcgccaataacctcaccagcaccatccaggtgtttacggactcggagtacctgctgccgtacgttctcggctctgcccaccagggctgcctgcctccgttcccggcggacgtgttcacgattccccagtacggctacctaacactcaacaacggtagtcaggccgtgggacgctcctccttctactgcctggaatactttccttcgcagatgctgagaaccggcaacaacttccagtttacttacaccttcgaggacgtgcctttccacagcagctacgcccacagccagagcttggaccggctgatgaatcctctgattgaccagtacctgtactacttgtctcggattcaaacaacaggaggcacggcaaatacgcagactctgggcttcagccaaggtgggcctaatacaatggccaatcaggcaaagaactggctgccaggaccctgttaccgccaacaacgcgtctcaacgacaaccgggcaaaacaacaatagcaactttgcctggactgctgggaccaaataccatctgaatggaagaaattcattggctaatcctggcatcgctatggcaacacacaaagacgacgaggagcgtttttttcccagtaacgggatcctgatttttggcaaacaaaatgctgccagagacaatgcggattacagcgatgtcatgcccaccagcgaggaagaaatcaaaaccactaaccctgtggccacagaggaatacggtatcgtggcagataacttgcagcagcaaaacacggctcctcaaattggaactgtcaacagccagggggccttacccggtatggtctggcagaaccgggacgtgtacctgcagggtcccatctgggccaagattcctcacacggacggcaacttccacccgtctccgctgatgggcggctttggcctgaaacatcctccgcctcagatcctgatcaagaacacgcctgtacctgcggatcctccgaccaccttcaaccagtcaaagctgaactctttcatcacgcaatacagcaccggacaggtcagcgtggaaattgaatgggagctgcagaaggaaaacagcaagcgctggaaccccgagatccagtacacctccaactactacaaatctacaagtgtggactttgctgttaatacagaaggcgtgtactctgaaccccgccccattggcacccgttacctcacccgtaatctgtaa

SEQ ID NO: 3890 - DNA, 2217 bp, Artificial Sequence
  Description of Artificial Sequence: Synthetic polynucleotide
atggctgccgatggttatcctccagattggctcgaggacaacctctctgagggcattcgcgagtggtgggcgctgaaacctggagccccgaagcccaaagccaaccagcaaaagcaggacgacggccggggtctggtgcttcctggctacaagtacctcggacccttcaacggactcgacaagggggagcccgtcaacgcggcggacgcggcggccctcgagcacgacaaggcctacgaccagcagctgcaggcgggtgacaatccgtacctgcggtataaccacgccgacgccgagtttcaggagcgtctgcaagaagatacgtcttttgggggcaacctcgggcgagcagtcttccaggccaagaagcgggttctcgaacctctcggtctggttgaggaaggcgctaagacggctcctggaaagaagagaccggtagagccatcaccccagcgttctccagactcctctacgggcatcggcaagaagggccaacagcccgccagaaaaagactcaattttggtcagactggcgactcagagtcagttccagaccctcaacctctcggagaacctccagcagcgccctctggtgtgggacctaatacaatggctgcaggcggtggcgcaccaatggcagacaataacgaaggcgccgacggagtgggtagttcctcgggaaattggcattgcgattccacatggctgggcgacagagtcatcaccaccagcacccgaacctgggccctgcccacctacaacaaccacctctacaagcaaatctccaacgggacatcgggaggagccaccaacgacaacacctacttcggctacagcaccccctgggggtattttgactttaacagattccactgccacttttcaccacgtgactggcagcgactcatcaacaacaactggggattccggcccaagagactcagcttcaagctcttcaacatccaggtcaaggaggtcacgcagaatgaaggcaccaagaccatcgccaataacctcaccagcaccatccaggtgtttacggactcggagtaccagctgccgtacgttctcggctctgcccaccagggctgcctgcctccgttcccggcggacgtgttcacgattccccagtacggctacctaacactcaacaacggtagtcaggccgtgggacgctcctccttctactgcctggaatactttccttcgcagatgctgagaaccggcaacaacttccagtttacttacaccttcgaggacgtgcctttccacagcagctacgcccacagccagagcttggaccggctgatgaatcctctgattgaccagtacctgtactacttgtctcggattcaaacaacaggaggcacggcaaatacgcagactctgggcttcagccaaggtgggcctaatacaatggccaatcaggcaaagaactggctgccaggaccctgttaccgccaacaacgcgtctcaacgacaaccgggcaaaacaacaatagcaactttgcctggactgctgggaccaaataccatctgaatggaagaaattcattggctaatcctggcatcgctatggcaacacacaaagacgacgaggagcgtttttttcccagtaacgggatcctgatttttggcaaacaaaatgctgccagagacaatgcggattacagcgatgtcatgcccaccagcgaggaagaaatcaaaaccactaaccctgtggccacagaggaatacggtatcgtggcagataacttgcagcagcaaaacacggctcctcaaattggaactgtcaacagccagggggccttacccggtatggtctggcagaaccgggacgtgtacctgcagggtcccatctgggccaagattcctcacacggacggcaacttccacccgtctccgctgatgggcggctttggcctgaaacatcctccgcctcagatcctgatcaagaacacgcctgtacctgcggatcctccgaccaccttcaaccagtcaaagctgaactctttcatcacgcaatacagcaccggacaggtcagcgtggaaattgaatgggagctgcagaaggaaaacagcaagcgctggaaccccgagatccagtacacctccaactactacaaatctacaagtgtggactttgctgttaatacagaaggcgtgtactctgaaccccgccccattggcacccgttacctcacccgtaatctgtaa

SEQ ID NO: 3891 - DNA, 2217 bp, Artificial Sequence
  Description of Artificial Sequence: Synthetic polynucleotide
atggctgccgatggttatcttccagattggctcgaggacaacctctctgagggcattcgcgagtggtgggcgctgaaacctggagccccgaagcccaaagccaaccagcaaaagcaggacgacggccggggtctggtgcttcctggctacaagtacctcggacccttcaacggactcgacaagggggagcccgtcaacgcggcggacgcggcggccctcgagcacgacaaggcctacgaccagcagctgcaggcgggtgacaatccgtacctgcggtataaccacgccgacgccgagtttcaggagcgtctgcaagaagatacgtcttttgggggcaacctcgggcgagcagtcttccaggccaagaagcgggttctcgaacctctcggtctggttgaggaaggcgctaagacggctcctggaaagaagagaccggtagagccatcaccccagcgttctccagactcctctacgggcatcggcaagaagggccaacagcccgccagaaaaagactcaattttggtcagactggcgactcagagtcagttccagaccctcaacctctcggagaacctccagcagcgccctctggtgtgggacctaatacaatggctgcaggcggtggcgcaccaatggcagacaataacgaaggcgccgacggagtgggtagttcctcgggaaattggcattgcgattccacatggctgggcgacagagtcatcaccaccagcacccgaacctgggccctgcccacctacaacaaccacctctacaagcaaatctccaacgggacatcgggaggagccaccaacgacaacacctacttcggctacagcaccccctgggggtattttgactttaacagattccactgccacttttcaccacgtgactggcagcgactcatcaacaacaactggggattccggcccaagagactcagcttcaagctcttcaacatccaggtcaaggaggtcacgcagaatgaaggcaccaagaccatcgccaataacctcaccagcaccatccaggtgtttacggactcggagtaccagctgccgtacgttctcggctctgcccaccagggctgcctgcctccgttcccggcggacgtgttcacgattccccagtacggctacctaacactcaacaacggtagtcaggccgtgggacgctcctccttctactgcctggaatactttccttcgcagatgctgagaaccggcaacaacttccagtttacttacaccttcgaggacgtgcctttccacagcagctacgcccacagccagagcttggaccggctgatgaatcctctgattgaccagtacctgtactacttgtctcggattcaaacaacaggaggcacggcaaatacgcagactctgggctccagccaaggtgggcctaatacaatggccaatcaggcaaagaactggctgccaggaccctgttaccgccaacaacgcgtctcaacgacaaccgggcaaaacaacaatagcaactttgcctggactgctgggaccaaataccatctgaatggaagaaattcattggctaatcctggcatcgctatggcaacacacaaagacgacgaggagcgtttttttcccagtaacgggatcctgatttttggcaaacaaaatgctgccagagacaatgcggattacagcgatgtcatgcccaccagcgaggaagaaatcaaaaccactaaccctgtggccacagaggaatacggtatcgtggcagataacttgcagcagcaaaacacggctcctcaaattggaactgtcaacagccagggggccttacccggtatggtctggcagaaccgggacgtgtacctgcagggtcccatctgggccaagattcctcacacggacggcaacttccacccgtctccgctgatgggcggctttggcctgaaacatcctccgcctcagatcctgatcaagaacacgcctgtacctgcggatcctccgaccaccttcaaccagtcaaagctgaactctttcatcacgcaatacagcaccggacaggtcagcgtggaaattgaatgggagctgcagaaggaaaacagcaagcgctggaaccccgagatccagtacacctccaactactacaaatctacaagtgtggactttgctgttaatacagaaggcgtgtactctgaaccccgccccattggcacccgttacctcacccgtaatctgtaa

SEQ ID NO: 3892 - DNA, 2217 bp, Artificial Sequence
  Description of Artificial Sequence: Synthetic polynucleotide
atggctgccgatggttatcttccagattggctcgaggacaacctctctgagggcattcgcgagtggtgggcgctgaaacctggagccccgaagcccaaagccaaccagcaaaagcaggacgacggccggggtctggtgcttcctggctacaagtacctcggacccttcaacggactcgacaagggggagcccgtcaacgcggcggacgcggcggccctcgagcacgacaaggcctacgaccagcagctgcaggcgggtgacaatccgtacctgcggtataaccacgccgacgccgagtttcaggagcgtctgcaagaagatacgtcttttgggggcaacctcgggcgagcagtcttccaggccaagaagcgggttctcgaacctctcggtctggttgaggaaggcgctaagacggctcctggaaagaagagaccggtagagccatcaccccagcgttctccagactcctctacgggcatcggcaagaagggccaacagcccgccagaaaaagactcaattttggtcagactggcgactcagagtcagttccagaccctcaacctctcggagaacctccagcagcgccctctggtgtgggacctaatacaatggctgcaggcggtggcgcaccaatggcagacaataacgaaggcgccgacggagtgggtagttcctcgggaaattggcattgcgattccacatggctgggcgacagagtcatcaccaccagcacccgaacctgggccctgcccacctacaacaaccacctctacaagcaaatctccaacgggacatcgggaggagccaccaacgacaacacctacttcggctacagcaccccctgggggtattttgactttaacagattccactgccacttttcaccacgtgactggcagcgactcatcaacaacaactggggattccggcccaagagactcagcttcaagctcttcaacatccaggtcaaggaggtcacgcagaatgaaggcaccaagaccatcgccaataacctcaccagcaccatccaggtgtttacggactcggagtaccagctgccgtacgttctcggctctgcccaccagggctgcctgcctccgttcccggcggacgtgttcacgattccccagtacggctacctaacactcaacaacggtagtcaggccgtgggacgctcctccttctactgcctggaatactttccttcgcagatgctgagaaccggcaacaacttccagtttacttacaccttcgaggacgtgcctttccacagcagctacgcccacagccagagcttggaccggctgatgaatcctctgattggccagtacctgtactacttgtctcggattcaaacaacaggaggcacggcaaatacgcagactctgggcttcagccaaggtgggcctaatacaatggccaatcaggcaaagaactggctgccaggaccctgttaccgccaacaacgcgtctcaacgacaaccgggcaaaacaacaatagcaactttgcctggactgctgggaccaaataccatctgaatggaagaaattcattggctaatcctggcatcgctatggcaacacacaaagacgacgaggagcgtttttttcccagtaacgggatcctgatttttggcaaacaaaatgctgccagagacaatgcggattacagcgatgtcatgcccaccagcgaggaagaaatcaaaaccactaaccctgtggccacagaggaatacggtatcgtggcagataacttgcagcagcaaaacacggctcctcaaattggaactgtcaacagccagggggccttacccggtatggtctggcagaaccgggacgtgtacctgcagggtcccatctgggccaagattcctcacacggacggcaacttccacccgtctccgctgatgggcggctttggcctgaaacatcctccgcctcagatcctgatcaagaacacgcctgtacctgcggatcctccgaccaccttcaaccagtcaaagctgaactctttcatcacgcaatacagcaccggacaggtcagcgtggaaattgaatgggagctgcagaaggaaaacagcaagcgctggaaccccgagatccagtacacctccaactactacaaatctacaagtgtggactttgctgttaatacagaaggcgtgtactctgaaccccgccccattggcacccgttacctcacccgtaatctgtaa

SEQ ID NO: 3893 - DNA, 2217 bp, Artificial Sequence
  Description of Artificial Sequence: Synthetic polynucleotide
atggctgccgatggttatcttccagattggctcgaggacaacctctctgagggcattcgcgagtggtgggcgctgaaacctggagccccgaagcccaaagccaaccagcaaaagcaggacgacggccggggtctggtgcttcctggctacaagtacctcggacccttcaacggactcgacaagggggagcccgtcaacgcggcggacgcggcggccctcgagcacgacaaggcctacgaccagcagctgcaggcgggtgacaatccgtacctgcggtataaccacgccgacgccgagtttcaggagcgtctgcaagaagatacgtcttttgggggcaacctcgggcgagcagtcttccaggccaagaagcgggttctcgaacctctcggtctggttgaggaaggcgctaagacggctcctggaaagaagagaccggtagagccatcaccccagcgttctccagactcctctacgggcatcggcaagaagggccaacagcccgccagaaaaagactcaattttggtcagactggcgactcagagtcagttccagaccctcaacctctcggagaacctccagcagcgccctctggtgtgggacctaatacaatggctgcaggcggtggcgcaccaatggcagacaataacgaaggcgccgacggagtgggtagttcctcgggaaattggcattgcgattccacatggctgggcgacagagtcatcaccaccagcacccgaacctgggccctgcccacctacaacaaccacctctacaagcaaatctccaacgggacatcgggaggagccaccaacgacaacacctacttcggctacagcaccccctgggggtattttgactttaacagattccactgccacttttcaccacgtgactggcagcgactcatcaacaacaactggggattccggcccaagagacccagcttcaagctcttcaacatccaggtcaaggaggtcacgcagaatgaaggcaccaagaccatcgccaataacctcaccagcaccatccaggtgtttacggactcggagtaccagctgccgtacgttctcggctctgcccaccagggctgcctgcctccgttcccggcggacgtgttcacgattccccagtacggctacctaacactcaacaacggtagtcaggccgtgggacgctcctccttctactgcctggaatactttccttcgcagatgctgagaaccggcaacaacttccagtttacttacaccttcgaggacgtgcctttccacagcagctacgcccacagccagagcttggaccggctgatgaatcctctgattgaccagtacctgtactacttgtctcggattcaaacaacaggaggcacggcaaatacgcagactctgggcttcagccaaggtgggcctaatacaatggccaatcaggcaaagaactggctgccaggaccctgttaccgccaacaacgcgtctcaacgacaaccgggcaaaacaacaatagcaactttgcctggactgctgggaccaaataccatctgaatggaagaaattcattggctaatcctggcatcgctatggcaacacacaaagacgacgaggagcgtttttttcccagtaacgggatcctgatttttggcaaacaaaatgctgccagagacaatgcggattacagcgatgtcatgcccaccagcgaggaagaaatcaaaaccactaaccctgtggccacagaggaatacggtatcgtggcagataacttgcagcagcaaaacacggctcctcaaattggaactgtcaacagccagggggccttacccggtatggtctggcagaaccgggacgtgtacctgcagggtcccatctgggccaagattcctcacacggacggcaacttccacccgtctccgctgatgggcggctttggcctgaaacatcctccgcctcagatcctgatcaagaacacgcctgtacctgcggatcctccgaccaccttcaaccagtcaaagctgaactctttcatcacgcaatacagcaccggacaggtcagcgtggaaattgaatgggagctgcagaaggaaaacagcaagcgctggaaccccgagatccagtacacctccaactactacaaatctacaagtgtggactttgctgttaatacagaaggcgtgtactctgaaccccgccccattggcacccgttacctcacccgtaatctgtaa

SEQ ID NO: 3894 - DNA, 2217 bp, Artificial Sequence
  Description of Artificial Sequence: Synthetic polynucleotide
atggctgccgatggttatcttccagattggctcgaggacaacctctctgagggcattcgcgagtggtgggcgctgaaacctggagccccgaagcccaaagccaaccagcaaaagcaggacgacggccggggtctggtgcttcctggctacaagtacctcggacccttcaacggactcgacaagggggagcccgtcaacgcggcggacgcggcggccctcgagcacgacaaggcctacgaccagcagctgcaggcgggtgacaatccgtacctgcggtataaccacgccgacgccgagtttcaggagcgtctgcaagaagatacgtcttttgggggcaacctcgggcgagcagtcttccaggccaagaagcgggttctcgaacctctcggtctggttgaggaaggcgctaagacggctcctggaaagaagagaccggtagagccatcaccccagcgttctccagactcctctacgggcatcggcaagaagggccaacagcccgccagaaaaagactcaattttggtcagactggcgactcagagtcagttccagaccctcaacctctcggagaacctccagcagcgccctctggtgtgggacctaatacaatggctgcaggcggtggcgcaccaatggcagacaataacgaaggcgccgacggagtgggtagttcctcgggaaattggcattgcgattccacatggctgggcgacagagtcatcaccaccagcacccgaacctgggccctgcccacctacaacaaccacctctacaagcaaatctccaacgggacatcgggaggagccaccaacgacaacacctacttcggctacagcaccccctgggggtattttgactttaacagattccactgccacttttcaccacgtgactggcagcgactcatcaacaacaactggggattccggcccaagagactcagcttcaagctcttcaacatccaggtcaaggaggtcacgcagaatgaaggcaccaagaccatcgccaataacctcaccagcaccatccaggtgtttacggactcggagtaccagctgccgtacgttctcggctctgcccaccagggctgcctgcctccgttcccggcggacgtgttcacgattccccagtacggctacctaacactcaacaacggtagtcaggccgtgggacgctcctccttctactgcctggaatactttccttcgcagatgctgagaaccggcaacaacttccagtttacttacaccttcgaggacgtgcctttccacagcagctacgcccacagccagagcttggaccggctgatgaatcctctgattgaccagtacctgtactacttgtctcggattcaaacaacaggaggcacggcaaatacgcagactctgggcttcagccaaggtgggcctaatacaatggccaatcaggcaaagaactggctgccaggaccctgttaccgccaacaacgcgtctcaacgacaaccgggcaaaacaacaatagcaactttgcctggactgctgggaccaaataccatctgaatggaagaaattcattggctaatcctggcatcgctatggcaacacacaaagacgacggggagcgtttttttcccagtaacgggatcctgatttttggcaaacaaaatgctgccagagacaatgcggattacagcgatgtcatgcccaccagcgaggaagaaatcaaaaccactaaccctgtggccacagaggaatacggtatcgtggcagataacttgcagcagcaaaacacggctcctcaaattggaactgtcaacagccagggggccttacccggtatggtctggcagaaccgggacgtgtacctgcagggtcccatctgggccaagattcctcacacggacggcaacttccacccgtctccgctgatgggcggctttggcctgaaacatcctccgcctcagatcctgatcaagaacacgcctgtacctgcggatcctccgaccaccttcaaccagtcaaagctgaactctttcatcacgcaatacagcaccggacaggtcagcgtggaaattgaatgggagctgcagaaggaaaacagcaagcgctggaaccccgagatccagtacacctccaactactacaaatctacaagtgtggactttgctgttaatacagaaggcgtgtactctgaaccccgccccattggcacccgttacctcacccgtaatctgtaa

SEQ ID NO: 3895 - DNA, 2217 bp, Artificial Sequence
  Description of Artificial Sequence: Synthetic polynucleotide
atggctgccgatggttatcttccagattggctcgaggacaacctctctgagggcattcgcgagtggtgggcgctgaaacctggagccccgaagcccaaagccaaccagcaaaagcaggacgacggccggggtctggtgcttcctggctacaagtacctcggacccttcaacggactcgacaagggggagcccgtcaacgcggcggacgcggcggccctcgagcacgacaaggcctacgaccagcagctgcaggcgggtgacaatccgtacctgcggtataaccacgccgacgccgagtttcaggagcgtctgcaagaagatacgtcttttgggggcaacctcgggcgagcagtcttccaggccaagaagcgggttctcgaacctctcggtctggttgaggaaggcgctaagacggctcctggaaagaagagaccggtagagccatcaccccagcgttctccagactcctctacgggcatcggcaagaagggccaacagcccgccagaaaaagactcaattttggtcagactggcgactcagagtcagttccagaccctcaacctctcggagaacctccagcagcgccctctggtgtgggacctaatacaatggctgcaggcggtggcgcaccaatggcagacaataacgaaggcgccgacggagtgggtagttcctcgggaaattggcattgcgattccacatggctgggcgacagagtcatcaccaccagcacccgaacctgggccccgcccacctacaacaaccacctctacaagcaaatctccaacgggacatcgggaggagccaccaacgacaacacctacttcggctacagcaccccctgggggtattttgactttaacagattccactgccacttttcaccacgtgactggcagcgactcatcaacaacaactggggattccggcccaagagactcagcttcaagctcttcaacatccaggtcaaggaggtcacgcagaatgaaggcaccaagaccatcgccaataacctcaccagcaccatccaggtgtttacggactcggagtaccagctgccgtacgttctcggctctgcccaccagggctgcctgcctccgttcccggcggacgtgttcacgattccccagtacggctacctaacactcaacaacggtagtcaggccgtgggacgctcctccttctactgcctggaatactttccttcgcagatgctgagaaccggcaacaacttccagtttacttacaccttcgaggacgtgcctttccacagcagctacgcccacagccagagcttggaccggctgatgaatcctctgattgaccagtacctgtactacttgtctcggattcaaacaacaggaggcacggcaaatacgcagactctgggcttcagccaaggtgggcctaatacaatggccaatcaggcaaagaactggctgccaggaccctgttaccgccaacaacgcgtctcaacgacaaccgggcaaaacaacaatagcaactttgcctggactgctgggaccaaataccatctgaatggaagaaattcattggctaatcctggcatcgctatggcaacacacaaagacgacgaggagcgtttttttcccagtaacgggatcctgatttttggcaaacaaaatgctgccagagacaatgcggattacagcgatgtcatgcccaccagcgaggaagaaatcaaaaccactaaccctgtggccacagaggaatacggtatcgtggcagataacttgcagcagcaaaacacggctcctcaaattggaactgtcaacagccagggggccttacccggtatggtctggcagaaccgggacgtgtacctgcagggtcccatctgggccaagattcctcacacggacggcaacttccacccgtctccgctgatgggcggctttggcctgaaacatcctccgcctcagatcctgatcaagaacacgcctgtacctgcggatcctccgaccaccttcaaccagtcaaagctgaactctttcatcacgcaatacagcaccggacaggtcagcgtggaaattgaatgggagctgcagaaggaaaacagcaagcgctggaaccccgagatccagtacacctccaactactacaaatctacaagtgtggactttgctgttaatacagaaggcgtgtactctgaaccccgccccattggcacccgttacctcacccgtaatctgtaa

SEQ ID NO: 3896 - DNA, 2217 bp, Artificial Sequence
  Description of Artificial Sequence: Synthetic polynucleotide
atggctgccgatggttatcttccagattggctcgaggacaacctctctgagggcattcgcgagtggtgggcgctgaaacctggagccccgaagcccaaagccaaccagcaaaagcaggacgacggccggggtctggtgcttcctggctacaagtacctcggacccttcaacggactcgacaagggggagcccgtcaacgcggcggacgcggcggccctcgagcacgacaaggcctacgaccagcagctgcaggcgggtgacaatccgtacctgcggtataaccacgccgacgccgagtttcaggagcgtctgcaagaagatacgtcttttgggggcaacctcgggcgagcagtcttccaggccaagaagcgggttctcgaacctctcggtctggttgaggaaggcgctaagacggctcctggaaagaagagaccggtagagccatcaccccagcgttctccagactcctctacgggcatcggcaagaagggccaacagcccgccagaaaaagactcaattttggtcagactggcgactcagagtcagttccagaccctcaacctctcggagaacctccagcagcgccctctggtgtgggacctaatacaatggctgcaggcggtggcgcaccaatggcagacaataacgaaggcgccgacggagtgggtagttcctcgggaaattggcattgcgattccacatggctgggcgacagagtcatcaccaccagcacccgaacctgggccctgcccacctacaacaaccacctctacaagcaaatctccaacgggacatcgggaggagccaccaacgacaacacctacttcggctacagcaccccctgggggtattttgactttaacagattccactgccacttttcaccacgtgactggcagcgactcatcaacaacaactggggattccggcccaagagactcggcttcaagctcttcaacatccaggtcaaggaggtcacgcagaatgaaggcaccaagaccatcgccaataacctcaccagcaccatccaggtgtttacggactcggagtaccagctgccgtacgttctcggctctgcccaccagggctgcctgcctccgttcccggcggacgtgttcacgattccccagtacggctacctaacactcaacaacggtagtcaggccgtgggacgctcctccttctactgcctggaatactttccttcgcagatgctgagaaccggcaacaacttccagtttacttacaccttcgaggacgtgcctttccacagcagctacgcccacagccagagcttggaccggctgatgaatcctctgattgaccagtacctgtactacttgtctcggattcaaacaacaggaggcacggcaaatacgcagactctgggcttcagccaaggtgggcctaatacaatggccaatcaggcaaagaactggctgccaggaccctgttaccgccaacaacgcgtctcaacgacaaccgggcaaaacaacaatagcaactttgcctggactgctgggaccaaataccacctgaatggaagaaattcattggctaatcctggcatcgctatggcaacacacaaagacgacgaggagcgtttttttcccagtaacgggatcctgatttttggcaaacaaaatgctgccagagacaatgcggattacagcgatgtcatgcccaccagcgaggaagaaatcaaaaccactaaccctgtggccacagaggaatacggtatcgtggcagataacttgcagcagcaaaacacggctcctcaaattggaactgtcaacagccagggggccttacccggtatggtctggcagaaccgggacgtgtacctgcagggtcccatctgggccaagattcctcacacggacggcaacttccacccgtctccgctgatgggcggctttggcctgaaacatcctccgcctcagatcctgatcaagaacacgcctgtacctgcggatcctccgaccaccttcaaccagtcaaagctgaactctttcatcacgcaatacagcaccggacaggtcagcgtggaaattgaatgggagctgcagaaggaaaacagcaagcgctggaaccccgagatccagtacacctccaactactacaaatctacaagtgtggactttgctgttaatacagaaggcgtgtactctgaaccccgccccattggcacccgttacctcacccgtaatctgtaa

SEQ ID NO: 3897 - DNA, 2217 bp, Artificial Sequence
  Description of Artificial Sequence: Synthetic polynucleotide
atggctgccgatggttatcttccagattggctcgaggacaacctctctgagggcattcgcgagtggtgggcgctgaaacctggagccccgaagcccaaagccaaccagcaaaagcaggacgacggccggggtctggtgcttcctggctacaagtacctcggacccttcaacggactcgacaagggggagcccgtcaacgcggcggacgcggcggccctcgagcacgacaaggcctacgaccagcagctgcaggcgggtgacaatccgtacctgcggtataaccacgccgacgccgagtttcaggagcgtctgcaagaagatacgtcttttgggggcaacctcgggcgagcagtcttccaggccaagaagcgggttctcgaacctctcggtctggttgaggaaggcgctaagacggctcctggaaagaagagaccggtagagccatcaccccagcgttctccagactcctctacgggcatcggcaagaagggccaacagcccgccagaaaaagactcaattttggtcggactggcgactcagagtcagttccagaccctcaacctctcggagaacctccagcagcgccctctggtgtgggacctaatacaatggctgcaggcggtggcgcaccaatggcagacaataacgaaggcgccgacggagtgggtagttcctcgggaaattggcattgcgattccacatggctgggcgacagagtcatcaccaccagcacccgaacctgggccctgcccacctacaacaaccacctctacaagcaaatctccaacgggacatcgggaggagccaccaacgacaacacctacttcggctacagcaccccctgggggtattttgactttaacagattccactgccacttttcaccacgtgactggcagcgactcatcaacaacaactggggattccggcccaagagactcagcttcaagctcttcaacatccaggtcaaggaggtcacgcagaatgaaggcaccaagaccatcgccaataacctcaccagcaccatccaggtgtttacggactcggagtaccagctgccgtacgttctcggctctgcccaccagggctgcctgcctccgttcccggcggacgtgttcacgattccccagtacggctacctaacactcaacaacggtagtcaggccgtgggacgctcctccttctactgcctggaatactttccttcgcagatgctgagaaccggcaacaacttccagtttacttacaccttcgaggacgtgcctttccacagcagctacgcccacagccagagcttggaccggctgatgaatcctctgattgaccagtacctgtactacttgtctcggattcaaacaacaggaggcacggcaaatacgcagactctgggcttcagccaaggtgggcctaatacaatggccaatcaggcaaagaactggctgccaggaccctgttaccgccaacaacgcgtctcaacgacaaccgggcaaaacaacaatagcaactttgcctggactgctgggaccaaataccatctgaatggaagaaattcattggctaatcctggcatcgctatggcaacacacaaagacgacgaggagcgtttttttcccagtaacgggatcctgatttttggcaaacaaaatgctgccagagacaatgcggattacagcgatgtcatgcccaccagcgaggaagaaatcaaaaccactaaccctgtggccacagaggaatacggtatcgtggcagataacttgcagcagcaaaacacggctcctcaaattggaactgtcaacagccagggggccttacccggtatggtctggcagaaccgggacgtgtacctgcagggtcccatctgggccaagattcctcacacggacggcaacttccacccgtctccgctgatgggcggctttggcctgaaacatcctccgcctcagatcctgatcaagaacacgcctgtacctgcggatcctccgaccaccttcaaccagtcaaagctgaactctttcatcacgcaatacagcaccggacaggtcagcgtggaaattgaatgggagctgcagaaggaaaacagcaagcgctggaaccccgagatccagtacacctccaactactacaaatctacaagtgtggactttgctgttaatacagaaggcgtgtactctgaaccccgccccattggcacccgttacctcacccgtaatctgtaa

SEQ ID NO: 3898 - DNA, 2217 bp, Artificial Sequence
  Description of Artificial Sequence: Synthetic polynucleotide
atggctgccgatggttatcttccagattggctcgaggacaacctctctgagggcattcgcgagtggtgggcgctgaaacctggagccccgaagcccaaagccaaccagcaaaagcaggacgacggccggggtctggtgcttcctggctacaagtacctcggacccttcaacggactcgacaagggggagcccgtcaacgcggcggacgcggcggccctcgagcacgacaaggcctacgaccagcagctgcaggcgggtgacaatccgtacctgcggtataaccacgccgacgccgagtttcaggagcgtctgcaagaagatacgtcttttgggggcaacctcgggcgagcagtcttccaggccaagaagcgggttctcgaacctctcggtctggttgaggaaggcgctaagacggctcctggaaagaagagaccggtagagccatcaccccagcgttctccagactcctctacgggcatcggcaagaagggccaacagcccgccagaaaaagactcaattttggtcagactggcgactcagagtcagttccagaccctcaacctctcggagaacctccagcagcgccctctggtgtgggacctaatacaatggctgcaggcggtggcgcaccaatggcagacaataacgaaggcgccgacggagtgggtagttcctcgggaaattggcattgcgattccacatggctgggcgacagagtcatcaccaccagcacccgaacctgggccctgcccacctacaacaaccacctctacaagcaaatctccaacgggacatcgggaggagccaccaacgacaacacctacttcggctacagcaccccctgggggtattttgactttaacagattccactgccacttttcaccacgtgactggcagcgactcatcaacaacaactggggattccggcccaagagactcagcttcaagctcttcaacatccaggtcaaggaggtcacgcagaatgaaggcaccaagaccatcgccaataacctcaccagcaccatccaggtgtttacggactcggagtaccagctgccgtacgttctcggctctgcccaccagggctgcctgcctccgttcccggcggacgtgttcacgattccccagtacggctacctaacactcaacaacggtagtcaggccgtgggacgctcctccttctactgcctggaatactttccttcgcagatgctgagaaccggcaacaacttccagtttacttacaccttcgaggacgtgcctttccacagcagctacgcccacagccagagcttggaccggctgatgaatcctctgattgaccagtacctgtactacttgtctcggattcaaacaacaggaggcacggcaaatacgcagactctgggcttcagccaaggtgggcctaatacagtggccaatcaggcaaagaactggctgccaggaccctgttaccgccaacaacgcgtctcaacgacaaccgggcaaaacaacaatagcaactttgcctggactgctgggaccaaataccatctgaatggaagaaattcattggctaatcctggcatcgctatggcaacacacaaagacgacgaggagcgtttttttcccagtaacgggatcctgatttttggcaaacaaaatgctgccagagacaatgcggattacagcgatgtcatgcccaccagcgaggaagaaatcaaaaccactaaccctgtggccacagaggaatacggtatcgtggcagataacttgcagcagcaaaacacggctcctcaaattggaactgtcaacagccagggggccttacccggtatggtctggcagaaccgggacgtgtacctgcagggtcccatctgggccaagattcctcacacggacggcaacttccacccgtctccgctgatgggcggctttggcctgaaacatcctccgcctcagatcctgatcaagaacacgcctgtacctgcggatcctccgaccaccttcaaccagtcaaagctgaactctttcatcacgcaatacagcaccggacaggtcagcgtggaaattgaatgggagctgcagaaggaaaacagcaagcgctggaaccccgagatccagtacacctccaactactacaaatctacaagtgtggactttgctgttaatacagaaggcgtgtactctgaaccccgccccattggcacccgttacctcacccgtaatctgtaa

SEQ ID NO: 3899 - DNA, 2217 bp, Artificial Sequence
  Description of Artificial Sequence: Synthetic polynucleotide
atggctgccgatggttatcttccagattggctcgaggacaacctctctgagggcattcgcgagtggtgggcgctgaaacctggagccccgaagcccaaagccaaccagcaaaagcaggacgacggccggggtctggtgcttcctggctacaagtacctcggacccttcaacggactcgacaagggggagcccgtcaacgcggcggacgcggcggccctcgagcacgacaaggcctacgaccagcagctgcaggcgggtgacaatccgtacctgcggtataaccacgccgacgccgagtttcaggagcgtctgcaagaagatacgtcttttgggggcaacctcgggcgagcagtcttccaggccaagaagcgggttctcgaacctctcggtctggttgaggaaggcgctaagacggctcctggaaagaagagaccggtagagccatcaccccagcgttctccagactcctctacgggcatcggcaagaagggccaacagcccgccagaaaaagactcaattttggtcagactggcgactcagagtcagttccagaccctcaacctctcggagaacctccagcagcgccctctggtgtgggacctaatacaatggctgcaggcggtggcgcaccaatggcagacaataacgaaggcgccgacggagtgggtagttcctcgggaaattggcattgcgattccacatggctgggcgacagagtcatcaccaccagcacccgaacctgggccctgcccacctacaacaaccacctctacaagcaaatctccaacgggacatcgggaggagccaccaacgacaacacctacttcggctacagcaccccctgggggtattttgactttaacagattccactgccacttttcaccacgtgactggcagcgactcatcaacaacaactggggattccggcccaagagactcagcttcaagctcttcaacatccaggtcaaggaggtcacgcagaatgaaggcaccaagaccatcgccaataacctcaccagcaccatccaggtgtttacggactcggagtaccagctgccgtacgttctcggctctgcccaccagggctgcctgcctccgttcccggcggacgtgttcacgattccccagtacggctacctaacactcaacaacggtagtcaggccgtgggacgctcctccttctactgcccggaatactttccttcgcagatgctgagaaccggcaacaacttccagtttacttacaccttcgaggacgtgcctttccacagcagctacgcccacagccagagcttggaccggctgatgaatcctctgattgaccagtacctgtactacttgtctcggattcaaacaacaggaggcacggcaaatacgcagactctgggcttcagccaaggtgggcctaatacaatggccaatcaggcaaagaactggctgccaggaccctgttaccgccaacaacgcgtctcaacgacaaccgggcaaaacaacaatagcaactttgcctggactgctgggaccaaataccatctgaatggaagaaattcattggctaatcctggcatcgctatggcaacacacaaagacgacgaggagcgtttttttcccagtaacgggatcctgatttttggcaaacaaaatgctgccagagacaatgcggattacagcgatgtcatgcccaccagcgaggaagaaatcaaaaccactaaccctgtggccacagaggaatacggtatcgtggcagataacttgcagcagcaaaacacggctcctcaaattggaactgtcaacagccagggggccttacccggtatggtctggcagaaccgggacgtgtacctgcagggtcccatctgggccaagattcctcacacggacggcaacttccacccgtctccgctgatgggcggctttggcctgaaacatcctccgcctcagatcctgatcaagaacacgcctgtacctgcggatcctccgaccaccttcaaccagtcaaagctgaactctttcatcacgcaatacagcaccggacaggtcagcgtggaaattgaatgggagctgcagaaggaaaacagcaagcgctggaaccccgagatccagtacacctccaactactacaaatctacaagtgtggactttgctgttaatacagaaggcgtgtactctgaaccccgccccattggcacccgttacctcacccgtaatctgtaa

SEQ ID NO: 3900 - DNA, 2217 bp, Artificial Sequence
  Description of Artificial Sequence: Synthetic polynucleotide
atggctgccgatggttatcttccagattggctcgaggacaacctctctgagggcattcgcgagtggtgggcgctgaaacctggagccccgaagcccaaagccaaccagcaaaagcaggacgacggccggggtctggtgcttcctggctacaagtacctcggacccttcaacggactcgacaagggggagcccgtcaacgcggcggacgcggcggccctcgagcacgacaaggcctacgaccagcagctgcaggcgggtgacaatccgtacctgcggtataaccacgccgacgccgagtttcaggagcgtctgcaagaagatacgtcttttgggggcaacctcgggcgagcagtcttccaggccaagaagcgggttctcgaacctctcggtctggttgaggaaggcgctaagacggctcctggaaagaagagaccggtagagccatcaccccagcgttctccagactcctctacgggcatcggcaagaagggccaacagcccgccagaaaaagactcaattttggtcagactggcgactcagagtcagttccagaccctcaacctctcggagaacctccagcagcgccctctggtgtgggacctaatacaatggctgcaggcggtggcgcaccaatggcagacaataacgaaggcgccgacggagtgggtagttcctcgggaaattggcattgcgattccacatggctgggcgacagagtcatcaccaccagcacccgaacctgggccctgcccacctacaacaaccacctctacaagcaaatctccaacgggacatcgggaggagccaccaacgacaacacctacttcggctacagcaccccctgggggtattttgactttaacagattccactgccacttttcaccacgtgactggcagcgactcatcaacaacaactggggattccggcccaagagactcagcttcaagctcttcaacatccaggtcaaggaggtcacgcagaatgaaggcaccaagaccatcgccaataacctcaccagcaccatccaggtgtttacggactcggagtaccagctgccgtacgttctcggctctgcccaccagggctgcctgcctccgttcccggcggacgtgttcacgattccccagtacggctacctaacactcaacaacggtagtcaggccgtgggacgctcctccttctactgcctggaatactttccttcgcagatgctgagaaccggcaacaacttccagtttacttacaccttcgaggacgtgcctttccacagcagctacgcccacagccagagcttggaccggctgatgaatcctctgattgaccagtacctgtactacttgtctcggattcaaacaacaggaggcacggcaaatacgcagactctgggcttcagccaaggtgggcctaatacaatggccaatcaggcaaagaactggctgccaggaccctgttaccgccaacaacgcgtctcaacgacaaccgggcaaaacaacaatagcaactttgcctggactgctgggaccaaataccatctgaatggaagaaattcattggctaatcctggcatcgctatggcaacacacaaagacgacgaggagcgtttttttcccagtaacgggatcctgatttttggcaaacaaaatgctgccagagacaatgcggattacagcgatgtcatgcccaccagcgaggaagaaatcaaaaccactaaccctgtggccacagaggaatacggtatcgtggcagatagcttgcagcagcaaaacacggctcctcaaattggaactgtcaacagccagggggccttacccggtatggtctggcagaaccgggacgtgtacctgcagggtcccatctgggccaagattcctcacacggacggcaacttccacccgtctccgctgatgggcggctttggcctgaaacatcctccgcctcagatcctgatcaagaacacgcctgtacctgcggatcctccgaccaccttcaaccagtcaaagctgaactctttcatcacgcaatacagcaccggacaggtcagcgtggaaattgaatgggagctgcagaaggaaaacagcaagcgctggaaccccgagatccagtacacctccaactactacaaatctacaagtgtggactttgctgttaatacagaaggcgtgtactctgaaccccgccccattggcacccgttacctcacccgtaatctgtaa

SEQ ID NO: 3901 - DNA, 2217 bp, Artificial Sequence
  Description of Artificial Sequence: Synthetic polynucleotide
atggctgccgatggttatcttccagattggctcgaggacaacctctctgagggcattcgcgagtggtgggcgctgaaacctggagccccgaagcccaaagccaaccagcaaaagcagggcgacggccggggtctggtgcttcctggctacaagtacctcggacccttcaacggactcgacaagggggagcccgtcaacgcggcggacgcggcggccctcgagcacgacaaggcctacgaccagcagctgcaggcgggtgacaatccgtacctgcggtataaccacgccgacgccgagtttcaggagcgtctgcaagaagatacgtcttttgggggcaacctcgggcgagcagtcttccaggccaagaagcgggttctcgaacctctcggtctggttgaggaaggcgctaagacggctcctggaaagaagagaccggtagagccatcaccccagcgttctccagactcctctacgggcatcggcaagaagggccaacagcccgccagaaaaagactcaattttggtcagactggcgactcagagtcagttccagaccctcaacctctcggagaacctccagcagcgccctctggtgtgggacctaatacaatggctgcaggcggtggcgcaccaatggcagacaataacgaaggcgccgacggagtgggtagttcctcgggaaattggcattgcgattccacatggctgggcgacagagtcatcaccaccagcacccgaacctgggccctgcccacctacaacaaccacctctacaagcaaatctccaacgggacatcgggaggagccaccaacgacaacacctacttcggctacagcaccccctgggggtattttgactttaacagattccactgccacttttcaccacgtgactggcagcgactcatcaacaacaactggggattccggcccaagagactcagcttcaagctcttcaacatccaggtcaaggaggtcacgcagaatgaaggcaccaagaccatcgccaataacctcaccagcaccatccaggtgtttacggactcggagtaccagctgccgtacgttctcggctctgcccaccagggctgcctgcctccgttcccggcggacgtgttcacgattccccagtacggctacctaacactcaacaacggtagtcaggccgtgggacgctcctccttctactgcctggaatactttccttcgcagatgctgagaaccggcaacaacttccagtttacttacaccttcgaggacgtgcctttccacagcagctacgcccacagccagagcttggaccggctgatgaatcctctgattgaccagtacctgtactacttgtctcggattcaaacaacaggaggcacggcaaatacgcagactctgggcttcagccaaggtgggcctaatacaatggccaatcaggcaaagaactggctgccaggaccctgttaccgccaacaacgcgtctcaacgacaaccgggcaaaacaacaatagcaactttgcctggactgctgggaccaaataccatctgaatggaagaaattcattggctaatcctggcatcgctatggcaacacacaaagacgacgaggagcgtttttttcccagtaacgggatcctgatttttggcaaacaaaatgctgccagagacaatgcggattacagcgatgtcatgcccaccagcgaggaagaaatcaaaaccactaaccctgtggccacagaggaatacggtatcgtggcagataacttgcagcagcaaaacacggctcctcaaattggaactgtcaacagccagggggccttacccggtatggtctggcagaaccgggacgtgtacctgcagggtcccatctgggccaagattcctcacacggacggcaacttccacccgtctccgctgatgggcggctttggcctgaaacatcctccgcctcagatcctgatcaagaacacgcctgtacctgcggatcctccgaccaccttcaaccagtcaaagctgaactctttcatcacgcaatacagcaccggacaggtcagcgtggaaattgaatgggagctgcagaaggaaaacagcaagcgctggaaccccgagatccagtacacctccaactactacaaatctacaagtgtggactttgctgttaatacagaaggcgtgtactctgaaccccgccccattggcacccgttacctcacccgtaatctgtaa

SEQ ID NO: 3902 - DNA, 2217 bp, Artificial Sequence
  Description of Artificial Sequence: Synthetic polynucleotide
atggctgccgatggttatcttccagattggctcgaggacaacctctctgagggcattcgcgagtggtgggcgctgaaacctggagccccgaagcccaaagccaaccagcaaaagcaggacgacggccggggtctggtgcttcctggctacaagtacctcggacccttcaacggactcgacaagggggagcccgtcaacgcggcggacgcggcggccctcgagcacgacaaggcctacgaccagcagctgcaggcgggtgacaatccgtacctgcggtataaccacgccgacgccgagtttcaggagcgtctgcaagaagatacgtcttttgggggcaacctcgggcgagcagtcttccaggccaagaagcgggttctcgaacctctcggtctggttgaggaaggcgctaagacggctcctggaaagaagagaccggtagagccatcaccccagcgttctccagactcctctacgggcatcggcaagaagggccaacagcccgccagaaaaagactcaattttggtcagactggcgactcagagtcagttccagaccctcaacctctcggagaacctccagcagcgccctctggtgtgggacctaatacaatggctgcaggcggtggcgcaccaatggcagacaataacgaaggcgccgacggagtgggtagttcctcgggaaattggcattgcgattccacatggctgggcgacagagtcatcaccaccagcacccgaacctgggccctgcccacctacaacaaccacctctacaagcaaatctccaacgggacatcgggaggagccaccaacgacaacacctacttcggctacagcaccccctgggggtattttgactttaacagattccactgccacttttcaccacgtgactggcagcgactcatcaacaacaactggggattccggcccaagagactcagctccaagctcttcaacatccaggtcaaggaggtcacgcagaatgaaggcaccaagaccatcgccaataacctcaccagcaccatccaggtgtttacggactcggagtaccagctgccgtacgttctcggctctgcccaccagggctgcctgcctccgttcccggcggacgtgttcacgattccccagtacggctacctaacactcaacaacggtagtcaggccgtgggacgctcctccttctactgcctggaatactttccttcgcagatgctgagaaccggcaacaacttccagtttacttacaccttcgaggacgtgcctttccacagcagctacgcccacagccagagcttggaccggctgatgaatcctctgattgaccagtacctgtactacttgtctcggattcaaacaacaggaggcacggcaaatacgcagactctgggcttcagccaaggtgggcctaatacaatggccaatcaggcaaagaactggctgccaggaccctgttaccgccaacaacgcgtctcaacgacaaccgggcaaaacaacaatagcaactttgcctggactgctgggaccaaataccatctgaatggaagaaattcattggctaatcctggcatcgctatggcaacacacaaagacgacgaggagcgtttttttcccagtaacgggatcctgatttttggcaaacaaaatgctgccagagacaatgcggattacagcgatgtcatgcccaccagcgaggaagaaatcaaaaccactaaccctgtggccacagaggaatacggtatcgtggcagataacttgcagcagcaaaacacggctcctcaaattggaactgtcaacagccagggggccttacccggtatggtctggcagaaccgggacgtgtacctgcagggtcccatctgggccaagattcctcacacggacggcaacttccacccgtctccgctgatgggcggctttggcctgaaacatcctccgcctcagatcctgatcaagaacacgcctgtacctgcggatcctccgaccaccttcaaccagtcaaagctgaactctttcatcacgcaatacagcaccggacaggtcagcgtggaaattgaatgggagctgcagaaggaaaacagcaagcgctggaaccccgagatccagtacacctccaactactacaaatctacaagtgtggactttgctgttaatacagaaggcgtgtactctgaaccccgccccattggcacccgttacctcacccgtaatctgtaa

SEQ ID NO: 3903 - DNA, 2217 bp, Artificial Sequence
  Description of Artificial Sequence: Synthetic polynucleotide
atggctgccgatggttatcttccagattggctcgaggacaacctctctgagggcattcgcgagtggtgggcgctgaaacctggagccccgaagcccaaagccaaccagcaaaagcaggacgacggccggggtctggtgcttcctggctacaagtacctcggacccttcaacggactcgacaagggggagcccgtcaacgcggcggacgcggcggccctcgagcacgacaaggcctacgaccagcagctgcaggcgggtgacaatccgtacctgcggtataaccacgccgacgccgagtttcaggagcgtctgcaagaagatacgtcttttgggggcaacctcgggcgagcagtcttccaggccaagaagcgggttctcgaacctctcggtctggttgaggaaggcgctaagacggctcctggaaagaagagaccggtagagccatcaccccagcgttctccagactcctctacgggcatcggcaagaagggccaacagcccgccagaaaaagactcaattttggtcagactggcgactcagagtcagttccagaccctcaacctctcggagaacctccagcagcgccctctggtgtgggacctaatacaatggctgcaggcggtggcgcaccaatggcagacaataacgaaggcgccgacggagtgggtagttcctcgggaaattggcattgcgattccacatggctgggcgacagagtcatcaccaccagcacccgaacctgggccctgcccacctacaacaaccacctctacaagcaaatctccaacgggacatcgggaggagccaccaacgacaacacctacttcggctacagcaccccctgggggtattttgactttaacagattccactgccacttttcaccacgtgactggcagcgactcatcaacaacaactggggattccggcccaagagactcagcttcaagctcttcaacatccaggtcaaggaggtcacgcagaatgaaggcaccaagaccatcgccaataacctcaccagcaccatccaggtgtttacggactcggagtaccagctgccgtacgttctcggctctgcccaccagggctgcctgcctccgttcccggcggacgtgttcacgattccccagtacggctacctaacactcaacaacggtagtcaggccgtgggacgctcctccttctactgcctggaatactttccttcgcagatgctgagaaccggcaacaacttccagtttacttacgccttcgaggacgtgcctttccacagcagctacgcccacagccagagcttggaccggctgatgaatcctctgattgaccagtacctgtactacttgtctcggattcaaacaacaggaggcacggcaaatacgcagactctgggcttcagccaaggtgggcctaatacaatggccaatcaggcaaagaactggctgccaggaccctgttaccgccaacaacgcgtctcaacgacaaccgggcaaaacaacaatagcaactttgcctggactgctgggaccaaataccatctgaatggaagaaattcattggctaatcctggcatcgctatggcaacacacaaagacgacgaggagcgtttttttcccagtaacgggatcctgatttttggcaaacaaaatgctgccagagacaatgcggattacagcgatgtcatgcccaccagcgaggaagaaatcaaaaccactaaccctgtggccacagaggaatacggtatcgtggcagataacttgcagcagcaaaacacggctcctcaaattggaactgtcaacagccagggggccttacccggtatggtctggcagaaccgggacgtgtacctgcagggtcccatctgggccaagattcctcacacggacggcaacttccacccgtctccgctgatgggcggctttggcctgaaacatcctccgcctcagatcctgatcaagaacacgcctgtacctgcggatcctccgaccaccttcaaccagtcaaagctgaactctttcatcacgcaatacagcaccggacaggtcagcgtggaaattgaatgggagctgcagaaggaaaacagcaagcgctggaaccccgagatccagtacacctccaactactacaaatctacaagtgtggactttgctgttaatacagaaggcgtgtactctgaaccccgccccattggcacccgttacctcacccgtaatctgtaa

SEQ ID NO: 3904 - DNA, 2217 bp, Artificial Sequence
  Description of Artificial Sequence: Synthetic polynucleotide
atggctgccgatggttatcttccagattggctcgaggacaacctctctgagggcattcgcgagtggtgggcgctgaaacctggagccccgaagcccaaagccaaccagcaaaagcaggacgacggccggggtctggtgcttcctggctacaagtacctcggacccttcaacggactcgacaagggggagcccgtcaacgcggcggacgcggcggccctcgagcacgacaaggcctacgaccagcagctgcaggcgggtgacaatccgtacctgcggtataaccacgccgacgccgagtttcaggagcgtctgcaagaagatacgtcttttgggggcaacctcgggcgagcagtcttccaggccaagaagcgggttctcgaacctctcggtctggttgaggaaggcgctaagacggctcctggaaagaagagaccggtagagccatcaccccagcgttctccagactcctctacgggcatcggcaagaagggccaacagcccgccagaaaaagactcaattttggtcagactggcgactcagagtcagttccagaccctcaacctctcggagaacctccagcagcgccctctggtgtgggacctaatacaatggctgcaggcggtggcgcaccaatggcagacaataacgaaggcgccgacggagtgggtagttcctcgggaaattggcattgcgattccacatggctgggcgacagagtcatcaccaccagcacccgaacctgggccctgcccgcctacaacaaccacctctacaagcaaatctccaacgggacatcgggaggagccaccaacgacaacacctacttcggctacagcaccccctgggggtattttgactttaacagattccactgccacttttcaccacgtgactggcagcgactcatcaacaacaactggggattccggcccaagagactcagcttcaagctcttcaacatccaggtcaaggaggtcacgcagaatgaaggcaccaagaccatcgccaataacctcaccagcaccatccaggtgtttacggactcggagtaccagctgccgtacgttctcggctctgcccaccagggctgcctgcctccgttcccggcggacgtgttcacgattccccagtacggctacctaacactcaacaacggtagtcaggccgtgggacgctcctccttctactgcctggaatactttccttcgcagatgctgagaaccggcaacaacttccagtttacttacaccttcgaggacgtgcctttccacagcagctacgcccacagccagagcttggaccggctgatgaatcctctgattgaccagtacctgtactacttgtctcggattcaaacaacaggaggcacggcaaatacgcagactctgggcttcagccaaggtgggcctaatacaatggccaatcaggcaaagaactggctgccaggaccctgttaccgccaacaacgcgtctcaacgacaaccgggcaaaacaacaatagcaactttgcctggactgctgggaccaaataccatctgaatggaagaaattcattggctaatcctggcatcgctatggcaacacacaaagacgacgaggagcgtttttttcccagtaacgggatcctgatttttggcaaacaaaatgctgccagagacaatgcggattacagcgatgtcatgcccaccagcgaggaagaaatcaaaaccactaaccctgtggccacagaggaatacggtatcgtggcagataacttgcagcagcaaaacacggctcctcaaattggaactgtcaacagccagggggccttacccggtatggtctggcagaaccgggacgtgtacctgcagggtcccatctgggccaagattcctcacacggacggcaacttccacccgtctccgctgatgggcggctttggcctgaaacatcctccgcctcagatcctgatcaagaacacgcctgtacctgcggatcctccgaccaccttcaaccagtcaaagctgaactctttcatcacgcaatacagcaccggacaggtcagcgtggaaattgaatgggagctgcagaaggaaaacagcaagcgctggaaccccgagatccagtacacctccaactactacaaatctacaagtgtggactttgctgttaatacagaaggcgtgtactctgaaccccgccccattggcacccgttacctcacccgtaatctgtaa

SEQ ID NO: 3905 - DNA, 2217 bp, Artificial Sequence
  Description of Artificial Sequence: Synthetic polynucleotide
atggctgccgatggttatcttccagattggctcgaggacaacctctctgagggcattcgcgagtggtgggcgctgaaacctggagccccgaagcccaaagccaaccagcaaaagcaggacgacggccggggtctggtgcttcctggctacaagtacctcggacccttcaacggactcgacaagggggagcccgtcaacgcggcggacgcggcggccctcgagcacgacaaggcctacgaccagcagctgcaggcgggtgacaatccgtacctgcggtataaccacgccgacgccgagtttcaggagcgtctgcaagaagatacgtcttttgggggcagcctcgggcgagcagtcttccaggccaagaagcgggttctcgaacctctcggtctggttgaggaaggcgctaagacggctcctggaaagaagagaccggtagagccatcaccccagcgttctccagactcctctacgggcatcggcaagaagggccaacagcccgccagaaaaagactcaattttggtcagactggcgactcagagtcagttccagaccctcaacctctcggagaacctccagcagcgccctctggtgtgggacctaatacaatggctgcaggcggtggcgcaccaatggcagacaataacgaaggcgccgacggagtgggtagttcctcgggaaattggcattgcgattccacatggctgggcgacagagtcatcaccaccagcacccgaacctgggccctgcccacctacaacaaccacctctacaagcaaatctccaacgggacatcgggaggagccaccaacgacaacacctacttcggctacagcaccccctgggggtattttgactttaacagattccactgccacttttcaccacgtgactggcagcgactcatcaacaacaactggggattccggcccaagagactcagcttcaagctcttcaacatccaggtcaaggaggtcacgcagaatgaaggcaccaagaccatcgccaataacctcaccagcaccatccaggtgtttacggactcggagtaccagctgccgtacgttctcggctctgcccaccagggctgcctgcctccgttcccggcggacgtgttcacgattccccagtacggctacctaacactcaacaacggtagtcaggccgtgggacgctcctccttctactgcctggaatactttccttcgcagatgctgagaaccggcaacaacttccagtttacttacaccttcgaggacgtgcctttccacagcagctacgcccacagccagagcttggaccggctgatgaatcctctgattgaccagtacctgtactacttgtctcggattcaaacaacaggaggcacggcaaatacgcagactctgggcttcagccaaggtgggcctaatacaatggccaatcaggcaaagaactggctgccaggaccctgttaccgccaacaacgcgtctcaacgacaaccgggcaaaacaacaatagcaactttgcctggactgctgggaccaaataccatctgaatggaagaaattcattggctaatcctggcatcgctatggcaacacacaaagacgacgaggagcgtttttttcccagtaacgggatcctgatttttggcaaacaaaatgctgccagagacaatgcggattacagcgatgtcatgcccaccagcgaggaagaaatcaaaaccactaaccctgtggccacagaggaatacggtatcgtggcagataacttgcagcagcaaaacacggctcctcaaattggaactgtcaacagccagggggccttacccggtatggtctggcagaaccgggacgtgtacctgcagggtcccatctgggccaagattcctcacacggacggcaacttccacccgtctccgctgatgggcggctttggcctgaaacatcctccgcctcagatcctgatcaagaacacgcctgtacctgcggatcctccgaccaccttcaaccagtcaaagctgaactctttcatcacgcaatacagcaccggacaggtcagcgtggaaattgaatgggagctgcagaaggaaaacagcaagcgctggaaccccgagatccagtacacctccaactactacaaatctacaagtgtggactttgctgttaatacagaaggcgtgtactctgaaccccgccccattggcacccgttacctcacccgtaatctgtaa

SEQ ID NO: 3906 - DNA, 2217 bp, Artificial Sequence
  Description of Artificial Sequence: Synthetic polynucleotide
atggctgccgatggttatcttccagattggctcgaggacaacctctctgagggcattcgcgagtggtgggcgctgaaacctggagccccgaagcccaaagccaaccagcaaaagcaggacgacggccggggtctggtgcttcctggctacaagtacctcggacccttcaacggactcgacaagggggagcccgtcaacgcggcggacgcggcggccctcgagcacgacaaggcctacgaccagcagctgcaggcgggtgacaatccgtacctgcggtataaccacgccgacgccgagtttcaggagcgtctgcaagaagatacgtcttttgggggcaacctcgggcgagcagtcttccaggccaagaagcgggttctcgaacctctcggtctggttgaggaaggcgctaagacggctcctggaaagaagagaccggtagagccatcaccccagcgttctccagactcctctacgggcatcggcaagaagggccaacagcccgccagaaaaagactcaattttggtcagactggcgactcagagtcagttccagaccctcaacctctcggagaacctccagcagcgccctctggtgtgggacctaatacaatggctgcaggcggtggcgcaccaatggcagacaataacgaaggcgccgacggagtgggtagttcctcgggaaattggcattgcgattccacatggctgggcgacagagtcatcaccaccagcacccgaacctgggccctgcccacctacaacaaccacctctacaagcaaatctccaacgggacatcgggaggagccaccaacgacaacacctacttcggctacagcaccccctgggggtattttgactttaacagattccactgccacttttcaccacgtgactggcagcgactcatcaacaacaactggggattccggcccaagagactcagcttcaagctcttcaacatccaggtcaaggaggtcacgcagaatgaaggcaccaagaccatcgccaataacctcaccagcaccatccaggtgtttacggactcggagtaccagctgccgtacgttctcggctctgcccaccagggctgcctgcctccgttcccggcggacgtgttcacgattccccagtacggctacctaacactcaacaacggtagtcaggccgtgggacgctcctccttctactgcctggaatactttccttcgcagatgctgagaaccggcaacaacttccagtttacttacaccttcgaggacgtgcctttccacagcagctacgcccacagccagagcttggaccggctgatgaatcctctgattgaccagtacctgtactacttgtctcggattcaaacaacaggaggcacggcaaatacgcagactctgggcttcagccaaggtgggcctaatacaatggccaatcaggcaacgaactggctgccaggaccctgttaccgccaacaacgcgtctcaacgacaaccgggcaaaacaacaatagcaactttgcctggactgctgggaccaaataccatctgaatggaagaaattcattggctaatcctggcatcgctatggcaacacacaaagacgacgaggagcgtttttttcccagtaacgggatcctgatttttggcaaacaaaatgctgccagagacaatgcggattacagcgatgtcatgcccaccagcgaggaagaaatcaaaaccactaaccctgtggccacagaggaatacggtatcgtggcagataacttgcagcagcaaaacacggctcctcaaattggaactgtcaacagccagggggccttacccggtatggtctggcagaaccgggacgtgtacctgcagggtcccatctgggccaagattcctcacacggacggcaacttccacccgtctccgctgatgggcggctttggcctgaaacatcctccgcctcagatcctgatcaagaacacgcctgtacctgcggatcctccgaccaccttcaaccagtcaaagctgaactctttcatcacgcaatacagcaccggacaggtcagcgtggaaattgaatgggagctgcagaaggaaaacagcaagcgctggaaccccgagatccagtacacctccaactactacaaatctacaagtgtggactttgctgttaatacagaaggcgtgtactctgaaccccgccccattggcacccgttacctcacccgtaatctgtaa

SEQ ID NO: 3907 - DNA, 2217 bp, Artificial Sequence
  Description of Artificial Sequence: Synthetic polynucleotide
atggctgccgatggttatcttccagattggctcgaggacaacctctctgagggcattcgcgagtggtgggcgctgaaacctggagccccgaagcccaaagccaaccagcaaaagcaggacgacggccggggtctggtgcttcctggctacaagtacctcggacccttcaacggactcgacaagggggagcccgtcaacgcggcggacgcggcggccctcgagcacgacaaggcctacggccagcagctgcaggcgggtgacaatccgtacctgcggtataaccacgccgacgccgagtttcaggagcgtctgcaagaagatacgtcttttgggggcaacctcgggcgagcagtcttccaggccaagaagcgggttctcgaacctctcggtctggttgaggaaggcgctaagacggctcctggaaagaagagaccggtagagccatcaccccagcgttctccagactcctctacgggcatcggcaagaagggccaacagcccgccagaaaaagactcaattttggtcagactggcgactcagagtcagttccagaccctcaacctctcggagaacctccagcagcgccctctggtgtgggacctaatacaatggctgcaggcggtggcgcaccaatggcagacaataacgaaggcgccgacggagtgggtagttcctcgggaaattggcattgcgattccacatggctgggcgacagagtcatcaccaccagcacccgaacctgggccctgcccacctacaacaaccacctctacaagcaaatctccaacgggacatcgggaggagccaccaacgacaacacctacttcggctacagcaccccctgggggtattttgactttaacagattccactgccacttttcaccacgtgactggcagcgactcatcaacaacaactggggattccggcccaagagactcagcttcaagctcttcaacatccaggtcaaggaggtcacgcagaatgaaggcaccaagaccatcgccaataacctcaccagcaccatccaggtgtttacggactcggagtaccagctgccgtacgttctcggctctgcccaccagggctgcctgcctccgttcccggcggacgtgttcacgattccccagtacggctacctaacactcaacaacggtagtcaggccgtgggacgctcctccttctactgcctggaatactttccttcgcagatgctgagaaccggcaacaacttccagtttacttacaccttcgaggacgtgcctttccacagcagctacgcccacagccagagcttggaccggctgatgaatcctctgattgaccagtacctgtactacttgtctcggattcaaacaacaggaggcacggcaaatacgcagactctgggcttcagccaaggtgggcctaatacaatggccaatcaggcaaagaactggctgccaggaccctgttaccgccaacaacgcgtctcaacgacaaccgggcaaaacaacaatagcaactttgcctggactgctgggaccaaataccatctgaatggaagaaattcattggctaatcctggcatcgctatggcaacacacaaagacgacgaggagcgtttttttcccagtaacgggatcctgatttttggcaaacaaaatgctgccagagacaatgcggattacagcgatgtcatgcccaccagcgaggaagaaatcaaaaccactaaccctgtggccacagaggaatacggtatcgtggcagataacttgcagcagcaaaacacggctcctcaaattggaactgtcaacagccagggggccttacccggtatggtctggcagaaccgggacgtgtacctgcagggtcccatctgggccaagattcctcacacggacggcaacttccacccgtctccgctgatgggcggctttggcctgaaacatcctccgcctcagatcctgatcaagaacacgcctgtacctgcggatcctccgaccaccttcaaccagtcaaagctgaactctttcatcacgcaatacagcaccggacaggtcagcgtggaaattgaatgggagctgcagaaggaaaacagcaagcgctggaaccccgagatccagtacacctccaactactacaaatctacaagtgtggactttgctgttaatacagaaggcgtgtactctgaaccccgccccattggcacccgttacctcacccgtaatctgtaa

SEQ ID NO: 3908 - DNA, 2217 bp, Artificial Sequence
  Description of Artificial Sequence: Synthetic polynucleotide
atggctgccgatggttatcttccagattggctcgaggacaacctctctgagggcattcgcgagtggtgggcgctgaaacctggagccccgaagcccaaagccaaccagcaaaagcaggacgacggccggggtctggtgcttcctggctacaagtacctcggacccttcaacggactcgacaagggggagcccgtcaacgcggcggacgcggcggccctcgagcacgacaaggcctacgaccagcagctgcaggcgggtgacaatccgtacctgcggtataaccacgccgacgccgagtttcaggagcgtctgcaagaagatacgtcttttgggggcaacctcgggcgagcagtcttccaggccaagaagcgggttctcgaacctctcggtctggttgaggaaggcgctaagacggctcctggaaagaagagaccggtagagccatcaccccagcgttctccagactcctctacgggcatcggcaagaagggccaacagcccgccagaaaaagactcaattttggtcagactggcgactcagagtcagttccagaccctcaacctctcggagaacctccagcagcgccctctggtgtgggacctaatacaatggctgcaggcggtggcgcaccaatggcagacaataacgaaggcgccgacggagtgggtagttcctcgggaaattggcattgcgattccacatggctgggcgacagagtcatcaccaccagcacccgaacctgggccctgcccacctacaacaaccacctctacaagcaaatctccaacgggacatcgggaggagccaccaacgacaacacctacttcggctacagcaccccctgggggtattttgactttaacagattccactgccacttttcaccacgtgactggcagcgactcatcaacaacaactggggattccggcccaagagactcagcttcaagctcctcaacatccaggtcaaggaggtcacgcagaatgaaggcaccaagaccatcgccaataacctcaccagcaccatccaggtgtttacggactcggagtaccagctgccgtacgttctcggctctgcccaccagggctgcctgcctccgttcccggcggacgtgttcacgattccccagtacggctacctaacactcaacaacggtagtcaggccgtgggacgctcctccttctactgcctggaatactttccttcgcagatgctgagaaccggcaacaacttccagtttacttacaccttcgaggacgtgcctttccacagcagctacgcccacagccagagcttggaccggctgatgaatcctctgattgaccagtacctgtactacttgtctcggattcaaacaacaggaggcacggcaaatacgcagactctgggcttcagccaaggtgggcctaatacaatggccaatcaggcaaagaactggctgccaggaccctgttaccgccaacaacgcgtctcaacgacaaccgggcaaaacaacaatagcaactttgcctggactgctgggaccaaataccatctgaatggaagaaattcattggctaatcctggcatcgctatggcaacacacaaagacgacgaggagcgtttttttcccagtaacgggatcctgatttttggcaaacaaaatgctgccagagacaatgcggattacagcgatgtcatgcccaccagcgaggaagaaatcaaaaccactaaccctgtggccacagaggaatacggtatcgtggcagataacttgcagcagcaaaacacggctcctcaaattggaactgtcaacagccagggggccttacccggtatggtctggcagaaccgggacgtgtacctgcagggtcccatctgggccaagattcctcacacggacggcaacttccacccgtctccgctgatgggcggctttggcctgaaacatcctccgcctcagatcctgatcaagaacacgcctgtacctgcggatcctccgaccaccttcaaccagtcaaagctgaactctttcatcacgcaatacagcaccggacaggtcagcgtggaaattgaatgggagctgcagaaggaaaacagcaagcgctggaaccccgagatccagtacacctccaactactacaaatctacaagtgtggactttgctgttaatacagaaggcgtgtactctgaaccccgccccattggcacccgttacctcacccgtaatctgtaa

SEQ ID NO: 3909 - DNA, 2217 bp, Artificial Sequence
  Description of Artificial Sequence: Synthetic polynucleotide
atggctgccgatggttatcttccagattggctcgaggacaacctctctgagggcattcgcgagtggtgggcgctgaaacctggagccccgaagcccaaagccaaccagcaaaagcaggacgacggccggggtctggtgcttcctggctacaagtacctcggacccttcaacggactcgacaagggggagcccgtcaacgcggcggacgcggcggccctcgagcacgacaaggcctacgaccagcagctgcaggcgggtgacaatccgtacctgcggtataaccacgccgacgccgagtttcaggagcgtctgcaagaagatacgtcttttgggggcaacctcgggcgagcagtcttccaggccaagaagcgggttctcgaacctctcggtctggttgaggaaggcgctaagacggctcctggaaagaagagaccggtagagccatcaccccagcgttctccagactcctctacgggcatcggcaagaagggccaacagcccgccagaaaaagactcaattttggtcagactggcgactcagagtcagttccagaccctcaacctctcggagaacctccagcagcgccctctggtgtgggacctaatacaatggctgcaggcggtggcgcaccaatggcagacaataacgaaggcgccgacggagtgggtagttcctcgggaaattggcattgcgattccacatggctgggcgacagagtcatcaccaccagcacccgaacctgggccctgcccacctacaacaaccacctctacaagcaaatctccaacgggacatcgggaggagccaccaacgacaacacctacttcggctacagcaccccctgggggtattttgactttaacagattccactgccacttttcaccacgtgactggcagcgactcatcaacaacaactggggattccggcccaagagactcagcttcaagctcttcaacatccaggtcaaggaggtcacgcagaatgaaggcaccaagaccatcgccaataacctcaccagcaccatccaggtgtttacggactcggagtaccagctgccgtacgttctcggctctgcccaccagggctgcctgcctccgttcccggcggacgtgttcacgattccccagtacggctacctaacactcaacaacggtagtcaggccgtgggacgctcctccttctactgcctggaatactttccttcgcagatgctgagaaccggcaacaacttccagtttacttacaccttcgaggacgtgcctttccacagcagctacgcccacagccagagcttggaccggctgatgaatcctctgattgaccagtacctgtactacttgtctcggattcaaacaacaggaggcacggcaaatacgcagactctgggcttcagccaaggtgggcctaatacaatggccaatcaggcaaagaactggctgccaggaccctgttaccgccaacaacgcgtctcaacgacaaccgggcaaaacaacaatagcaactttgcctggactgctgggaccaaataccatctgaatggaagaaattcattggctaatcctggcatcgctatggcaacacacaaagacgacgaggagcgtttttttcccagtaacgggatcctgatttttggcaaacaaaatgctgccagagacaatgcggattacagcgatgtcgtgcccaccagcgaggaagaaatcaaaaccactaaccctgtggccacagaggaatacggtatcgtggcagataacttgcagcagcaaaacacggctcctcaaattggaactgtcaacagccagggggccttacccggtatggtctggcagaaccgggacgtgtacctgcagggtcccatctgggccaagattcctcacacggacggcaacttccacccgtctccgctgatgggcggctttggcctgaaacatcctccgcctcagatcctgatcaagaacacgcctgtacctgcggatcctccgaccaccttcaaccagtcaaagctgaactctttcatcacgcaatacagcaccggacaggtcagcgtggaaattgaatgggagctgcagaaggaaaacagcaagcgctggaaccccgagatccagtacacctccaactactacaaatctacaagtgtggactttgctgttaatacagaaggcgtgtactctgaaccccgccccattggcacccgttacctcacccgtaatctgtaa

SEQ ID NO: 3910 - DNA, 2217 bp, Artificial Sequence
  Description of Artificial Sequence: Synthetic polynucleotide
atggctgccgatggttatcttccagattggctcgaggacaacctctctgagggcattcgcgagtggtgggcgctgaaacctggagccccgaagcccaaagccaaccagcaaaagcaggacgacggccggggtctggtgcttcctggctacaagtacctcggacccttcaacggactcgacaagggggagcccgtcaacgcggcggacgcggcggccctcgagcacgacaaggcctacgaccagcagctgcaggcgggtgacaatccgtacctgcggtataaccacgccgacgccgagtttcaggagcgtctgcaagaagatacgtcttttgggggcaacctcgggcgagcagtcttccaggccaagaagcgggttctcgaacctctcggtctggttgaggaaggcgctaagacggctcctggaaagaagagaccggtagagccatcaccccagcgttctccagactcctctacgggcatcggcaagaagggccgacagcccgccagaaaaagactcaattttggtcagactggcgactcagagtcagttccagaccctcaacctctcggagaacctccagcagcgccctctggtgtgggacctaatacaatggctgcaggcggtggcgcaccaatggcagacaataacgaaggcgccgacggagtgggtagttcctcgggaaattggcattgcgattccacatggctgggcgacagagtcatcaccaccagcacccgaacctgggccctgcccacctacaacaaccacctctacaagcaaatctccaacgggacatcgggaggagccaccaacgacaacacctacttcggctacagcaccccctgggggtattttgactttaacagattccactgccacttttcaccacgtgactggcagcgactcatcaacaacaactggggattccggcccaagagactcagcttcaagctcttcaacatccaggtcaaggaggtcacgcagaatgaaggcaccaagaccatcgccaataacctcaccagcaccatccaggtgtttacggactcggagtaccagctgccgtacgttctcggctctgcccaccagggctgcctgcctccgttcccggcggacgtgttcacgattccccagtacggctacctaacactcaacaacggtagtcaggccgtgggacgctcctccttctactgcctggaatactttccttcgcagatgctgagaaccggcaacaacttccagtttacttacaccttcgaggacgtgcctttccacagcagctacgcccacagccagagcttggaccggctgatgaatcctctgattgaccagtacctgtactacttgtctcggattcaaacaacaggaggcacggcaaatacgcagactctgggcttcagccaaggtgggcctaatacaatggccaatcaggcaaagaactggctgccaggaccctgttaccgccaacaacgcgtctcaacgacaaccgggcaaaacaacaatagcaactttgcctggactgctgggaccaaataccatctgaatggaagaaattcattggctaatcctggcatcgctatggcaacacacaaagacgacgaggagcgtttttttcccagtaacgggatcctgatttttggcaaacaaaatgctgccagagacaatgcggattacagcgatgtcatgcccaccagcgaggaagaaatcaaaaccactaaccctgtggccacagaggaatacggtatcgtggcagataacttgcagcagcaaaacacggctcctcaaattggaactgtcaacagccagggggccttacccggtatggtctggcagaaccgggacgtgtacctgcagggtcccatctgggccaagattcctcacacggacggcaacttccacccgtctccgctgatgggcggctttggcctgaaacatcctccgcctcagatcctgatcaagaacacgcctgtacctgcggatcctccgaccaccttcaaccagtcaaagctgaactctttcatcacgcaatacagcaccggacaggtcagcgtggaaattgaatgggagctgcagaaggaaaacagcaagcgctggaaccccgagatccagtacacctccaactactacaaatctacaagtgtggactttgctgttaatacagaaggcgtgtactctgaaccccgccccattggcacccgttacctcacccgtaatctgtaa

SEQ ID NO: 3911 - DNA, 2217 bp, Artificial Sequence
  Description of Artificial Sequence: Synthetic polynucleotide
atggctgccgatggttatcttccagattggctcgaggacaacctctctgagggcattcgcgagtggtgggcgctgaaacctggagccccgaagcccaaagccaaccagcaaaagcaggacgacggccggggtctggtgcttcctggctacaagtacctcggacccttcaacggactcgacaagggggagcccgtcaacgcggcggacgcggcggccctcgagcacgacaaggcctacgaccagcagctgcaggcgggtgacaatccgtacctgcggtataaccacgccgacgccgagtttcaggagcgtctgcaagaagatacgtcttttgggggcaacctcgggcgagcagtcttccaggccaagaagcgggttctcgaacctctcggtctggttgaggaaggcgctaagacggctcctggaaagaagagaccggtagagtcatcaccccagcgttctccagactcctctacgggcatcggcaagaagggccaacagcccgccagaaaaagactcaattttggtcagactggcgactcagagtcagttccagaccctcaacctctcggagaacctccagcagcgccctctggtgtgggacctaatacaatggctgcaggcggtggcgcaccaatggcagacaataacgaaggcgccgacggagtgggtagttcctcgggaaattggcattgcgattccacatggctgggcgacagagtcatcaccaccagcacccgaacctgggccctgcccacctacaacaaccacctctacaagcaaatctccaacgggacatcgggaggagccaccaacgacaacacctacttcggctacagcaccccctgggggtattttgactttaacagattccactgccacttttcaccacgtgactggcagcgactcatcaacaacaactggggattccggcccaagagactcagcttcaagctcttcaacatccaggtcaaggaggtcacgcagaatgaaggcaccaagaccatcgccaataacctcaccagcaccatccaggtgtttacggactcggagtaccagctgccgtacgttctcggctctgcccaccagggctgcctgcctccgttcccggcggacgtgttcacgattccccagtacggctacctaacactcaacaacggtagtcaggccgtgggacgctcctccttctactgcctggaatactttccttcgcagatgctgagaaccggcaacaacttccagtttacttacaccttcgaggacgtgcctttccacagcagctacgcccacagccagagcttggaccggctgatgaatcctctgattgaccagtacctgtactacttgtctcggattcaaacaacaggaggcacggcaaatacgcagactctgggcttcagccaaggtgggcctaatacaatggccaatcaggcaaagaactggctgccaggaccctgttaccgccaacaacgcgtctcaacgacaaccgggcaaaacaacaatagcaactttgcctggactgctgggaccaaataccatctgaatggaagaaattcattggctaatcctggcatcgctatggcaacacacaaagacgacgaggagcgtttttttcccagtaacgggatcctgatttttggcaaacaaaatgctgccagagacaatgcggattacagcgatgtcatgcccaccagcgaggaagaaatcaaaaccactaaccctgtggccacagaggaatacggtatcgtggcagataacttgcagcagcaaaacacggctcctcaaattggaactgtcaacagccagggggccttacccggtatggtctggcagaaccgggacgtgtacctgcagggtcccatctgggccaagattcctcacacggacggcaacttccacccgtctccgctgatgggcggctttggcctgaaacatcctccgcctcagatcctgatcaagaacacgcctgtacctgcggatcctccgaccaccttcaaccagtcaaagctgaactctttcatcacgcaatacagcaccggacaggtcagcgtggaaattgaatgggagctgcagaaggaaaacagcaagcgctggaaccccgagatccagtacacctccaactactacaaatctacaagtgtggactttgctgttaatacagaaggcgtgtactctgaaccccgccccattggcacccgttacctcacccgtaatctgtaa

SEQ ID NO: 3912 - DNA, 2217 bp, Artificial Sequence
  Description of Artificial Sequence: Synthetic polynucleotide
atggctgccgatggttatcttccagattggctcgaggacaacctctctgagggcattcgcgagtggtgggcgctgaaacctggagccccgaagcccaaagccaaccagcaaaagcaggacgacggccggggtctggtgcttcctggctacaagtacctcggacccttcaacggactcgacaagggggagcccgtcaacgcggcggacgcggcggccctcgagcacgacaaggcctacgaccagcagctgcaggcgggtgacaatccgtacctgcggtataaccacgccgacgccgagtttcaggagcgtctgcaagaagatacgtcttttgggggcaacctcgggcgagcagtcttccaggccaagaagcgggttctcgaacctctcggtctggttgaggaaggcgctaagacggctcctggaaagaagagaccggtagagccatcaccccagcgttctccagactcctctacgggcatcggcaagaagggccaacagcccgccagaaaaagactcaattttggtcagactggcgactcagagtcagttccagaccctcaacctctcggagaacctccagcagcgccctctggtgcgggacctaatacaatggctgcaggcggtggcgcaccaatggcagacaataacgaaggcgccgacggagtgggtagttcctcgggaaattggcattgcgattccacatggctgggcgacagagtcatcaccaccagcacccgaacctgggccctgcccacctacaacaaccacctctacaagcaaatctccaacgggacatcgggaggagccaccaacgacaacacctacttcggctacagcaccccctgggggtattttgactttaacagattccactgccacttttcaccacgtgactggcagcgactcatcaacaacaactggggattccggcccaagagactcagcttcaagctcttcaacatccaggtcaaggaggtcacgcagaatgaaggcaccaagaccatcgccaataacctcaccagcaccatccaggtgtttacggactcggagtaccagctgccgtacgttctcggctctgcccaccagggctgcctgcctccgttcccggcggacgtgttcacgattccccagtacggctacctaacactcaacaacggtagtcaggccgtgggacgctcctccttctactgcctggaatactttccttcgcagatgctgagaaccggcaacaacttccagtttacttacaccttcgaggacgtgcctttccacagcagctacgcccacagccagagcttggaccggctgatgaatcctctgattgaccagtacctgtactacttgtctcggattcaaacaacaggaggcacggcaaatacgcagactctgggcttcagccaaggtgggcctaatacaatggccaatcaggcaaagaactggctgccaggaccctgttaccgccaacaacgcgtctcaacgacaaccgggcaaaacaacaatagcaactttgcctggactgctgggaccaaataccatctgaatggaagaaattcattggctaatcctggcatcgctatggcaacacacaaagacgacgaggagcgtttttttcccagtaacgggatcctgatttttggcaaacaaaatgctgccagagacaatgcggattacagcgatgtcatgcccaccagcgaggaagaaatcaaaaccactaaccctgtggccacagaggaatacggtatcgtggcagataacttgcagcagcaaaacacggctcctcaaattggaactgtcaacagccagggggccttacccggtatggtctggcagaaccgggacgtgtacctgcagggtcccatctgggccaagattcctcacacggacggcaacttccacccgtctccgctgatgggcggctttggcctgaaacatcctccgcctcagatcctgatcaagaacacgcctgtacctgcggatcctccgaccaccttcaaccagtcaaagctgaactctttcatcacgcaatacagcaccggacaggtcagcgtggaaattgaatgggagctgcagaaggaaaacagcaagcgctggaaccccgagatccagtacacctccaactactacaaatctacaagtgtggactttgctgttaatacagaaggcgtgtactctgaaccccgccccattggcacccgttacctcacccgtaatctgtaa

SEQ ID NO: 3913 - DNA, 2217 bp, Artificial Sequence
  Description of Artificial Sequence: Synthetic polynucleotide
atggctgccgatggttatcttccagattggctcgaggacaacctctctgagggcattcgcgagtggtgggcgctgaaacctggagccccgaagcccaaagccaaccagcaaaagcaggacgacggccggggtctggtgcttcctggctacaagtacctcggacccttcaacggactcgacaagggggagcccgtcaacgcggcggacgcggcggccctcgagcacgacaaggcctacgaccagcagctgcaggcgggtgacaatccgtacctgcggtataaccacgccgacgccgagtttcaggagcgtctgcaagaagatacgtcttttgggggcaacctcgggcgagcagtcttccaggccaagaagcgggttctcgaacctctcggtctggttgaggaaggcgctaagacggctcctggaaagaagagaccggtagagccatcaccccagcgttctccagactcctctacgggcatcggcaagaagggccaacagcccgccagaaaaagactcaattttggtcagactggcgactcagagtcagttccagaccctcaacctctcggagaacctccagcagcgccctctggtgtgggacctaatacaatggctgcaggcggtggcgcaccaatggcagacaataacgaaggcgccgacggagtgggtagttcctcgggaaattggcattgcgattccacatggctgggcgacagagtcatcaccaccagcacccgaacctgggccctgcccacctacaacaaccacctctacaagcaaatctccaacgggacatcgggaggagccaccaacgacaacacctacttcggctacagcaccccctgggggtattttgactttaacagattccactgccacttttcaccacgtgactggcagcgactcatcaacaacaactggggattccggcccaagagactcagcttcaagctcttcaacatccaggtcaaggaggtcacgcagaatgaaggcaccaagaccatcgccaataacctcaccagcaccatccaggtgtttacggactcggagtaccagctgccgtacgttctcggctctgcccaccagggctgcctgcctccgttcccggcggacgtgttcacgattccccagtacggctacctaacactcaacaacggtagtcaggccgtgggacgctcctccttctactgcctggaatactttccttcgcagatgctgagaaccggcaacaacttccagtttacttacaccttcgaggacgtgcctttccacagcagctacgcccacagccagagcttggaccggctgatgaatcctctgattgaccagtacccgtactacttgtctcggattcaaacaacaggaggcacggcaaatacgcagactctgggcttcagccaaggtgggcctaatacaatggccaatcaggcaaagaactggctgccaggaccctgttaccgccaacaacgcgtctcaacgacaaccgggcaaaacaacaatagcaactttgcctggactgctgggaccaaataccatctgaatggaagaaattcattggctaatcctggcatcgctatggcaacacacaaagacgacgaggagcgtttttttcccagtaacgggatcctgatttttggcaaacaaaatgctgccagagacaatgcggattacagcgatgtcatgcccaccagcgaggaagaaatcaaaaccactaaccctgtggccacagaggaatacggtatcgtggcagataacttgcagcagcaaaacacggctcctcaaattggaactgtcaacagccagggggccttacccggtatggtctggcagaaccgggacgtgtacctgcagggtcccatctgggccaagattcctcacacggacggcaacttccacccgtctccgctgatgggcggctttggcctgaaacatcctccgcctcagatcctgatcaagaacacgcctgtacctgcggatcctccgaccaccttcaaccagtcaaagctgaactctttcatcacgcaatacagcaccggacaggtcagcgtggaaattgaatgggagctgcagaaggaaaacagcaagcgctggaaccccgagatccagtacacctccaactactacaaatctacaagtgtggactttgctgttaatacagaaggcgtgtactctgaaccccgccccattggcacccgttacctcacccgtaatctgtaa

SEQ ID NO: 3914 - DNA, 2217 bp, Artificial Sequence
  Description of Artificial Sequence: Synthetic polynucleotide
atggctgccgatggttatcttccagattggctcgaggacaacctctctgagggcattcgcgagtggtgggcgctgaaacctggagccccgaagcccaaagccaaccagcaaaagcaggacgacggccggggtctggtgcttcctggctacaagtacctcggacccttcaacggactcgacaagggggagcccgtcaacgcggcggacgcggcggccctcgagcacgacaaggcctacgaccagcagctgcaggcgggtgacaatccgtacctgcggtataaccacgccgacgccgagtttcaggagcgtctgcaagaagatacgtcttttgggggcaacctcgggcgagcagtcttccaggccaagaagcgggttctcgaacctctcggtctggttgaggaaggcgctaagacggctcctggaaagaagagaccggtagagccatcaccccagcgttctccagactcctctacgggcatcggcaagaagggccaacagcccgccagaaaaagactcaattttggtcagactggcgactcagagtcagttccagaccctcaacctctcggagaacctccagcagcgccctctggtgtgggacctaatacaatggctgcaggcggtggcgcaccaatggcagacaataacgaaggcgccgacggagtgggtagttcctcgggaaattggcattgcgattccacatggctgggcgacagagtcatcaccaccagcacccgaacctgggccctgcccacctacaacaaccacctctacaagcaaatctccaacgggacatcgggaggagccaccaacgacaacacctacttcggctacagcaccccctgggggtattttgactttaacagattccactgccacttttcaccacgtgactggcagcgactcatcaacaacaactggggattccggcccaagagactcagcttcaagctcttcaacatccaggtcaaggaggtcacgcagaatgaaggcaccaagaccatcgccaataacctcaccagcaccatccaggtgtttacggactcggagtaccagctgccgtacgttctcggctctgcccaccagggctgcctgcctccgttcccggcggacgtgttcacgattccccagtacggctacctaacactcaacaacggtagtcaggccgtgggacgctcctccttctactgcctggaatactttccttcgcagatgctgagaaccggcaacaacttccagtttacttacaccttcgaggacgtgcctttccacagcagctacgcccacagccagagcttggaccggctgatgaatcctctgattgaccagtacctgtactacttgtctcggattcaaacaacaggaggcacggcaaatacgcagactctgggcttcagccaaggtgggcctaatacaatggccaatcaggcaaagaactggctgccaggaccctgttaccgccaacaacgcgtctcaacgacaaccgggcaaagcaacaatagcaactttgcctggactgctgggaccaaataccatctgaatggaagaaattcattggctaatcctggcatcgctatggcaacacacaaagacgacgaggagcgtttttttcccagtaacgggatcctgatttttggcaaacaaaatgctgccagagacaatgcggattacagcgatgtcatgcccaccagcgaggaagaaatcaaaaccactaaccctgtggccacagaggaatacggtatcgtggcagataacttgcagcagcaaaacacggctcctcaaattggaactgtcaacagccagggggccttacccggtatggtctggcagaaccgggacgtgtacctgcagggtcccatctgggccaagattcctcacacggacggcaacttccacccgtctccgctgatgggcggctttggcctgaaacatcctccgcctcagatcctgatcaagaacacgcctgtacctgcggatcctccgaccaccttcaaccagtcaaagctgaactctttcatcacgcaatacagcaccggacaggtcagcgtggaaattgaatgggagctgcagaaggaaaacagcaagcgctggaaccccgagatccagtacacctccaactactacaaatctacaagtgtggactttgctgttaatacagaaggcgtgtactctgaaccccgccccattggcacccgttacctcacccgtaatctgtaa

SEQ ID NO: 3915 - DNA, 2217 bp, Artificial Sequence
  Description of Artificial Sequence: Synthetic polynucleotide
atggctgccgatggttatcttccagattggctcgaggacaacctctctgagggcattcgcgagtggtgggcgctgaaacctggagccccgaagcccaaagccaaccagcaaaagcaggacgacggccggggtctggtgcttcctggctacaagtacctcggacccttcaacggactcgacaagggggagcccgtcaacgcggcggacgcggcggccctcgagcacgacaaggcctacgaccagcagctgcaggcgggtgacaatccgtacctgcggtataaccacgccgacgccgagtttcaggagcgtctgcaagaagatacgtcttttgggggcaacctcgggcgagcagtcttccaggccaagaagcgggttctcgaacctctcggtctggttgaggaaggcgctaagacggctcctggaaagaagagaccggtagagccatcaccccagcgttctccagactcctctacgggcatcggcaagaagggccaacagcccgccagaaaaagactcaattttggtcagactggcgactcagagtcagttccagaccctcaacctctcggagaacctccagcagcgccctctggtgtgggacctaatacaatggctgcaggcggtggcgcaccaatggcagacaataacgaaggcgccgacggagtgggtagttcctcgggaaattggcattgcgattccacatggctgggcgacagagtcatcaccaccagcacccgaacctgggccctgcccacctacaacaaccacctctacaagcaaatctccaacgggacatcgggaggagccaccaacgacaacacctacttcggctacagcaccccctgggggtattttgactttaacagattccactgccacttttcaccacgtgactggcagcgactcatcaacaacaactggggattccggcccaagagactcagcttcaagctcttcaacatccaggtcaaggaggtcacgcagaatgaaggcaccaagaccatcgccaataacctcaccagcaccatccaggtgtttacggactcggagtaccagctgccgtacgttctcggctctgcccaccagggctgcctgcctccgttcccggcggacgtgttcacgattccccagtacggctacctaacactcaacaacggtagtcaggccgtgggacgctcctccttctactgcctggaatactttccttcgcagatgctgagaaccggcaacaacttccagtttacttacaccttcgaggacgtgcctttccacagcagctacgcccacagccagagcttggaccggctgatgaatcctctgattgaccagtacctgtactacttgtctcggattcaaacaacaggaggcacggcaaatacgcagactctgggcttcagccaaggtgggcctaatacaatggccaatcaggcaaagaactggctgccaggaccccgttaccgccaacaacgcgtctcaacgacaaccgggcaaaacaacaatagcaactttgcctggactgctgggaccaaataccatctgaatggaagaaattcattggctaatcctggcatcgctatggcaacacacaaagacgacgaggagcgtttttttcccagtaacgggatcctgatttttggcaaacaaaatgctgccagagacaatgcggattacagcgatgtcatgcccaccagcgaggaagaaatcaaaaccactaaccctgtggccacagaggaatacggtatcgtggcagataacttgcagcagcaaaacacggctcctcaaattggaactgtcaacagccagggggccttacccggtatggtctggcagaaccgggacgtgtacctgcagggtcccatctgggccaagattcctcacacggacggcaacttccacccgtctccgctgatgggcggctttggcctgaaacatcctccgcctcagatcctgatcaagaacacgcctgtacctgcggatcctccgaccaccttcaaccagtcaaagctgaactctttcatcacgcaatacagcaccggacaggtcagcgtggaaattgaatgggagctgcagaaggaaaacagcaagcgctggaaccccgagatccagtacacctccaactactacaaatctacaagtgtggactttgctgttaatacagaaggcgtgtactctgaaccccgccccattggcacccgttacctcacccgtaatctgtaa

SEQ ID NO: 3916 - DNA, 2217 bp, Artificial Sequence
  Description of Artificial Sequence: Synthetic polynucleotide
atggctgccgatggttatcttccagattggctcgaggacaacctctctgagggcattcgcgagtggtgggcgctgaaacctggagccccgaagcccaaagccaaccagcaaaagcaggacgacggccggggtctggtgcttcctggctacaagtacctcggacccttcaacggactcgacaagggggagcccgtcaacgcggcggacgcggcggccctcgagcacgacaaggcctacgaccagcagctgcaggcgggtgacaatccgtacctgcggtataaccacgccgacgccgagtttcaggagcgtctgcaagaagatacgtcttttgggggcaacctcgggcgagcagtcttccaggccaagaagcgggttctcgaacctctcggtctggttgaggaaggcgctaagacggctcctggaaagaagagaccggtagagccatcaccccagcgttctccagactcctctacgggcatcggcaagaagggccaacagcccgccagaaaaagactcaattttggtcagactggcgactcagagtcagttccagaccctcaacctctcggagaacctccagcagcgccctctggtgtgggacctaatacaatggctgcaggcggtggcgcaccaatggcagacaataacgaaggcgccgacggagtgggtagttcctcgggaaattggcattgcgattccacatggctgggcgacagagtcatcaccaccagcacccgaacctgggccctgcccacctacaacaaccacctctacaagcaaatctccaacgggacatcgggaggagccaccaacgacaacacctacttcggctacagcaccccctgggggtattttgactttaacagattccactgccacttttcaccacgtgactggcagcgactcatcaacaacaactggggattccggcccaagagactcagcttcaagctcttcaacatccaggtcaaggaggtcacgcagaatgaaggcaccaagaccatcgccaataacctcaccagcaccatccaggtgtttacggactcggagtaccagctgccgtacgttctcggctctgcccaccagggctgcctgcctccgttcccggcggacgtgttcacgattccccagtacggctacctaacactcaacaacggtagtcaggccgtgggacgctcctccttctactgcctggaatactttccttcgcagatgctgagaaccggcaacaacttccagtttacttacaccttcgaggacgtgcctttccacagcagctacgcccacagccagagcttggaccggctgatgaatcctctgattgaccagtacctgtactacttgtctcggattcaaacaacaggaggcacggcaaatacgcagactctgggcttcagccaaggtgggcctaatacaatggccaatcaggcaaagaactggctgccaggaccctgttaccgccaacaacgcgtctcaacgacaaccgggcaaaacaacaatagcaactttgcctggactgctgggaccaaataccatctgaatggaagaaattcattggctaatcctggcatcgctatggcaacacacaaagacgacgaggagcgtttttttcccagtaacgggatcctgatttttggcaaacaaaatgctgccagagacaatgcggattacagcgatgtcatgcccaccagcgaggaagaaatcaaaaccactaaccctgtggccacagaggaatacggtatcgtggcagataacttgcagcagcaaaacacggctcctcaaattggaactgtcaacagccagggggccttacccggtatggtctggcagaaccgggacgtgtacctgcagggtcccatctgggccaagattcctcacacggacggcaacttccacccgtctccgctgatgggcggctttggcctgaaacatcctccgcctcagatcctgatcaagaacgcgcctgtacctgcggatcctccgaccaccttcaaccagtcaaagctgaactctttcatcacgcaatacagcaccggacaggtcagcgtggaaattgaatgggagctgcagaaggaaaacagcaagcgctggaaccccgagatccagtacacctccaactactacaaatctacaagtgtggactttgctgttaatacagaaggcgtgtactctgaaccccgccccattggcacccgttacctcacccgtaatctgtaa

SEQ ID NO: 3917 - DNA, 2217 bp, Artificial Sequence
  Description of Artificial Sequence: Synthetic polynucleotide
atggctgccgatggttatcttccagattggctcgaggacaacctctctgagggcattcgcgagtggtgggcgctgaaacctggagccccgaagcccaaagccaaccagcaaaagcaggacgacggccggggtctggtgcttcctggctacaagtacctcggacccttcaacggactcgacaagggggagcccgtcaacgcggcggacgcggcggccctcgagcacgacaaggcctacgaccagcagctgcaggcgggtgacaatccgtacctgcggtataaccacgccgacgccgagtttcaggagcgtctgcaagaagatacgtcttttgggggcaacctcgggcgagcagtcttccaggccaagaagcgggttctcgaacctctcggtctggttgaggaaggcgctaagacggctcctggaaagaagagaccggtagagccatcaccccagcgttctccagactcctctacgggcatcggcaagaagggccaacagcccgccagaaaaagactcaattttggtcagactggcgactcagagtcagttccagaccctcaacctctcggagaacctccagcagcgccctctggtgtgggacctaatacaatggctgcaggcggtggcgcaccaatggcagacaataacgaaggcgccgacggagtgggtagttcctcgggaaattggcattgcgattccacatggctgggcgacagagtcatcaccaccagcacccgaacctgggccctgcccacctacaacaaccacctctacaagcaaatctccaacgggacatcgggaggagccaccaacgacaacacctacttcggctacagcaccccctgggggtattttgactttaacagattccactgccacttttcaccacgtgaccggcagcgactcatcaacaacaactggggattccggcccaagagactcagcttcaagctcttcaacatccaggtcaaggaggtcacgcagaatgaaggcaccaagaccatcgccaataacctcaccagcaccatccaggtgtttacggactcggagtaccagctgccgtacgttctcggctctgcccaccagggctgcctgcctccgttcccggcggacgtgttcacgattccccagtacggctacctaacactcaacaacggtagtcaggccgtgggacgctcctccttctactgcctggaatactttccttcgcagatgctgagaaccggcaacaacttccagtttacttacaccttcgaggacgtgcctttccacagcagctacgcccacagccagagcttggaccggctgatgaatcctctgattgaccagtacctgtactacttgtctcggattcaaacaacaggaggcacggcaaatacgcagactctgggcttcagccaaggtgggcctaatacaatggccaatcaggcaaagaactggctgccaggaccctgttaccgccaacaacgcgtctcaacgacaaccgggcaaaacaacaatagcaactttgcctggactgctgggaccaaataccatctgaatggaagaaattcattggctaatcctggcatcgctatggcaacacacaaagacgacgaggagcgtttttttcccagtaacgggatcctgatttttggcaaacaaaatgctgccagagacaatgcggattacagcgatgtcatgcccaccagcgaggaagaaatcaaaaccactaaccctgtggccacagaggaatacggtatcgtggcagataacttgcagcagcaaaacacggctcctcaaattggaactgtcaacagccagggggccttacccggtatggtctggcagaaccgggacgtgtacctgcagggtcccatctgggccaagattcctcacacggacggcaacttccacccgtctccgctgatgggcggctttggcctgaaacatcctccgcctcagatcctgatcaagaacacgcctgtacctgcggatcctccgaccaccttcaaccagtcaaagctgaactctttcatcacgcaatacagcaccggacaggtcagcgtggaaattgaatgggagctgcagaaggaaaacagcaagcgctggaaccccgagatccagtacacctccaactactacaaatctacaagtgtggactttgctgttaatacagaaggcgtgtactctgaaccccgccccattggcacccgttacctcacccgtaatctgtaa

SEQ ID NO: 3918 - DNA, 2217 bp, Artificial Sequence
  Description of Artificial Sequence: Synthetic polynucleotide
atggctgccgatggttatcttccagattggctcgaggacaacctctctgagggcattcgcgagtggtgggcgctgaaacctggagccccgaagcccaaagccaaccagcaaaagcaggacgacggccggggtctggtgcttcctggctacaagtacctcggacccttcaacggactcgacaagggggagcccgtcaacgcggcggacgcggcggccctcgagcacgacaaggcctacgaccagcagctgcaggcgggtgacaatccgtacctgcggtataaccacgccgacgccgagtttcaggagcgtctgcaagaagatacgtcttttgggggcaacctcgggcgagcagtcttccaggccaagaagcgggttctcgaacctctcggtctggttgaggaaggcgctaagacggctcctggaaagaagagaccggtagagccatcaccccagcgttctccagactcctctacgggcatcggcaagaagggccaacagcccgccagaaaaagactcaattttggtcagactggcgactcagagtcagttccagaccctcaacctctcggagaacctccagcagcgccctctggtgtgggacctaatacaatggctgcaggcggtggcgcaccaatggcagacaataacgaaggcgccgacggagtgggtagttcctcgggaaattggcattgcgattccacatggctgggcgacagagtcatcaccaccagcacccgaacctgggccctgcccacctacaacaaccacctctacaagcaaatctccaacgggacatcgggaggagccaccaacgacaacacctacttcggctacagcaccccctgggggtattttgactttaacagattccactgccacttttcaccacgtgactggcagcgactcatcaacaacaactggggattccggcccaagagactcagcttcaagctcttcaacatccaggtcaaggaggtcacgcagaatgaaggcaccaagaccatcgccaataacctcaccagcaccatccaggtgtttacggactcggagtaccagctgccgtacgttctcggctctgcccaccagggctgcctgcctccgttcccggcggacgtgttcacgattccccagtacggctacctaacactcaacaacggtagtcaggccgtgggacgctcctccttctactgcctggaatactttccttcgcagatgctgagaaccggcaacaacttccagtttacttacaccttcgaggacgtgcctttccacagcagctacgcccacagccagagcttggaccggctgatgaatcctctgattgaccagtacctgtactacttgtctcggattcaaacaacaggaggcacggcaaatacgcagactctgggcttcagccaaggtgggcctaatacaatggccaatcaggcaaagaactggctgccaggaccctgttaccgccaacaacgcgtctcaacgacaaccgggcaaaacaacaatagcaactttgcctggactgctgggaccaaataccatctgaatggaagaaattcattggctaatcctggcatcgctatggcaacacacaaagacgacgaggagcgtttttttcccagtaacgggatcctgatttttggcaaacaaaatgctgccagagacaatgcggattacagcgatgtcatgcccaccagcgaggaagaaatcaaaaccactaaccctgtggccacagaggaatacggtatcgtggcagataacttgcagcagcaaaacacggctcctcaaattggaactgtcaacagccagggggccttacccggtatggtctggcagaaccgggacgtgtacctgcagggtcccatctgggccaagattcctcacacggacggcagcttccacccgtctccgctgatgggcggctttggcctgaaacatcctccgcctcagatcctgatcaagaacacgcctgtacctgcggatcctccgaccaccttcaaccagtcaaagctgaactctttcatcacgcaatacagcaccggacaggtcagcgtggaaattgaatgggagctgcagaaggaaaacagcaagcgctggaaccccgagatccagtacacctccaactactacaaatctacaagtgtggactttgctgttaatacagaaggcgtgtactctgaaccccgccccattggcacccgttacctcacccgtaatctgtaa

SEQ ID NO: 3919 - DNA, 2217 bp, Artificial Sequence
  Description of Artificial Sequence: Synthetic polynucleotide
atggctgccgatggttatcttccagattggctcgaggacaacctctctgagggcattcgcgagtggtgggcgctgaaacctggagccccgaagcccaaagccaaccagcaaaagcaggacgacggccggggtctggtgcttcctggctacaagtacctcggacccttcaacggactcgacaagggggagcccgtcaacgcggcggacgcggcggccctcgagcacgacaaggcctacgaccagcagctgcaggcgggtgacaatccgtacctgcggtataaccacgccgacgccgagtttcaggagcgtctgcaagaagatacgtcttttgggggcaacctcgggcgagcagtcttccaggccaagaagcgggttctcgaacctctcggtctggttgaggaaggcgctaagacggctcctggaaagaagagaccggtagagccatcaccccagcgttctccagactcctctacgggcatcggcaagaagggccaacagcccgccagaaaaagactcaattttggtcagactggcgactcagagtcagttccagaccctcaacctctcggagaacctccaacagcgccctctggtgtgggacctaatacaatggctgcaggcggtggcgcaccaatggcagacaataacgaaggcgccgacggagtgggtagttcctcgggaaattggcattgcgattccacatggctgggcgacagagtcatcaccaccagcacccgaacctgggccctgcccacctacaacaaccacctctacaagcaaatctccaacgggacatcgggaggagccaccaacgacaacacctacttcggctacagcaccccctgggggtattttgactttaacagattccactgccacttttcaccacgtgactggcagcgactcatcaacaacaactggggattccggcccaagagactcagcttcaagctcttcaacatccaggtcaaggaggtcacgcagaatgaaggcaccaagaccatcgccaataacctcaccagcaccatccaggtgtttacggactcggagtaccagctgccgtacgttctcggctctgcccaccagggctgcctgcctccgttcccggcggacgtgttcacgattccccagtacggctacctaacactcaacaacggtagtcaggccgtgggacgctcctccttctactgcctggaatactttccttcgcagatgctgagaaccggcaacaacttccagtttacttacaccttcgaggacgtgcctttccacagcagctacgcccacagccagagcttggaccggctgatgaatcctctgattgaccagtacctgtactacttgtctcggattcaaacaacaggaggcacggcaaatacgcagactctgggcttcagccaaggtgggcctaatacaatggccaatcaggcaaagaactggctgccaggaccctgttaccgccaacaacgcgtctcaacgacaaccgggcaaaacaacaatagcaactttgcctggactgctgggaccaaataccatctgaatggaagaaattcattggctaatcctggcatcgctatggcaacacacaaagacgacgaggagcgtttttttcccagtaacgggatcctgatttttggcaaacaaaatgctgccagagacaatgcggattacagcgatgtcatgcccaccagcgaggaagaaatcaaaaccactaaccctgtggccacagaggaatacggtatcgtggcagataacttgcagcagcaaaacacggctcctcaaattggaactgtcaacagccagggggccttacccggtatggtctggcagaaccgggacgtgtacctgcagggtcccatctgggccaagattcctcacacggacggcaacttccacccgtctccgctgatgggcggctttggcctgaaacatcctccgcctcagatcctgatcaagaacacgcctgtacctgcggatcctccgaccaccttcaaccagtcaaagctgaactctttcatcacgcaatacagcaccggacaggtcagcgtggaaattgaatgggagctgcagaaggaaaacagcaagcgctggaaccccgagatccagtacacctccaactactacaaatctacaagtgtggactttgctgttaatacagaaggcgtgtactctgaaccccgccccattggcacccgttacctcacccgtaatctgtaa

SEQ ID NO: 3920 - DNA, 2217 bp, Artificial Sequence
  Description of Artificial Sequence: Synthetic polynucleotide
atggctgccgatggttatcttccagattggctcgaggacaacctctctgagggcattcgcgagtggtgggcgctgaaacctggagccccgaagcccaaagccaaccagcaaaagcaggacgacggccggggtctggtgcttcctggctacaagtacctcggacccttcaacggactcgacaagggggagcccgtcaacgcggcggacgcggcggccctcgagcacgacaaggcctacgaccagcagctgcaggcgggtgacaatccgtacctgcggtataaccacgccgacgccgagtttcaggagcgtctgcaagaagatacgtcttttgggggcaacctcgggcgagcagtcttccaggccaagaagcgggttctcgaacctctcggtctggttgaggaaggcgctaagacggctcctggaaagaagagaccggtagagccatcaccccagcgttctccagactcctctacgggcatcggcaagaagggccaacagcccgccagaaaaagactcaattttggtcagactggcgactcagagtcagttccagaccctcaacctctcggagaacctccagcagcgccctctggtgtgggacctaatacaatggctgcaggcggtggcgcaccaatggcagacaataacgaaggcgccgacggagtgggtagttcctcgggaaattggcattgcgattccacatggctgggcgacagagtcatcaccaccagcacccgaacctgggccctgcccacctacaacaaccacctctacaagcaaatctccaacgggacatcgggaggagccaccaacgacaacacctacttcggctacagcaccccctgggggtattttgactttaacagattccactgccacttttcaccacgtgactggcagcgactcatcaacaacaactggggattccggcccaagagactcagcttcaagctcttcaacatccaggtcaaggaggtcacgcagaatgaaggcaccaagaccatcgccaataacctcaccagcaccatccaggtgtttacggactcggagtaccagctgccgtacgttctcggctctgcccaccagggctgcctgcctccgttcccggcggacgtgttcacgattccccagtacggctacctaacactcaacaacggtagtcaggccgtgggacgctcctccttctactgcctggaatactttccttcgcagatgctgagaaccggcaacaacttccagtttacttacaccttcgaggacgtgcctttccacagcagctacgcccacagccagagcttggaccggctgatgaatcctctgattgaccagtacctgtactacttgtctcggattcaaacaacaggaggcacggcaaatacgcagactctgggcttcagccaaggtgggcctaatacaatggccaatcaggcaaagaactggctgccaggaccctgttaccgccaacaacgcgtctcaacgacaaccgggcaaaacaacaatagcaactttgcctggactgctgggaccaaataccatctgaatggaagaaattcattggctaatcctggcatcgctatggcaacacacaaagacgacgaggagcgtttttttcccagtaacgggatcctgatttttggcaaacaaaatgctgccagagacaatgcggattacagcgatgtcatgcccaccagcgaggaagaaatcaaaaccactaaccctgtggccacagaggaatacggtatcgtggcagataacttgcagcagcaaaacacggctcctcaaattggaactgtcaacagccagggggccttacccggtatggtctggcagaaccgggacgtgtacctgcagggtcccatctgggccaagattcctcacacggacggcaacttccacccgtctccgctgatgggcggctttggcctgaaacatcctccgcctcagatcctgatcaagaacacgcctgtacctgcggatcctccgaccaccttcaaccagtcaaagctgaactctttcatcacgcaatacagcaccggacaggtcagcgtggaaattgaatgggagctgcagaaggaaaacagcaagcgctggaaccccgagatccagtacacctccaactactacaaatctacaagtgtggactttgctgttaatgcagaaggcgtgtactctgaaccccgccccattggcacccgttacctcacccgtaatctgtaa

SEQ ID NO: 3921 - DNA, 2217 bp, Artificial Sequence
  Description of Artificial Sequence: Synthetic polynucleotide
atggctgccgatggttatcttccagattggctcgaggacaacctctctgagggcattcgcgagtggtgggcgctgaaacctggagccccgaagcccaaagccaaccagcaaaagcaggacgacggccggggtctggtgcttcctggctacaagtacctcggacccttcaacggactcgacaagggggagcccgtcaacgcggcggacgcggcggccctcgagcacgacaaggcctacgaccagcagctgcaggcgggtgacaatccgtacctgcggtataaccacgccgacgccgagtttcaggagcgtctgcaagaagatacgtcttttgggggcaacctcgggcgagcagtcttccaggccaagaagcgggttctcgaacctctcggtctggttgaggaaggcgctaagacggctcctggaaagaagagaccggtagagccatcaccccagcgttctccagactcctctacgggcatcggcaagaagggccaacagcccgccagaaaaagactcaattttggtcagactggcgactcagagtcagttccagaccctcaacctctcggagaacctccagcagcgccctctggtgtgggacctaatacaatggctgcaggcggtggcgcaccaatggcagacaataacgaaggcgccgacggagcgggtagttcctcgggaaattggcattgcgattccacatggctgggcgacagagtcatcaccaccagcacccgaacctgggccctgcccacctacaacaaccacctctacaagcaaatctccaacgggacatcgggaggagccaccaacgacaacacctacttcggctacagcaccccctgggggtattttgactttaacagattccactgccacttttcaccacgtgactggcagcgactcatcaacaacaactggggattccggcccaagagactcagcttcaagctcttcaacatccaggtcaaggaggtcacgcagaatgaaggcaccaagaccatcgccaataacctcaccagcaccatccaggtgtttacggactcggagtaccagctgccgtacgttctcggctctgcccaccagggctgcctgcctccgttcccggcggacgtgttcacgattccccagtacggctacctaacactcaacaacggtagtcaggccgtgggacgctcctccttctactgcctggaatactttccttcgcagatgctgagaaccggcaacaacttccagtttacttacaccttcgaggacgtgcctttccacagcagctacgcccacagccagagcttggaccggctgatgaatcctctgattgaccagtacctgtactacttgtctcggattcaaacaacaggaggcacggcaaatacgcagactctgggcttcagccaaggtgggcctaatacaatggccaatcaggcaaagaactggctgccaggaccctgttaccgccaacaacgcgtctcaacgacaaccgggcaaaacaacaatagcaactttgcctggactgctgggaccaaataccatctgaatggaagaaattcattggctaatcctggcatcgctatggcaacacacaaagacgacgaggagcgtttttttcccagtaacgggatcctgatttttggcaaacaaaatgctgccagagacaatgcggattacagcgatgtcatgcccaccagcgaggaagaaatcaaaaccactaaccctgtggccacagaggaatacggtatcgtggcagataacttgcagcagcaaaacacggctcctcaaattggaactgtcaacagccagggggccttacccggtatggtctggcagaaccgggacgtgtacctgcagggtcccatctgggccaagattcctcacacggacggcaacttccacccgtctccgctgatgggcggctttggcctgaaacatcctccgcctcagatcctgatcaagaacacgcctgtacctgcggatcctccgaccaccttcaaccagtcaaagctgaactctttcatcacgcaatacagcaccggacaggtcagcgtggaaattgaatgggagctgcagaaggaaaacagcaagcgctggaaccccgagatccagtacacctccaactactacaaatctacaagtgtggactttgctgttaatacagaaggcgtgtactctgaaccccgccccattggcacccgttacctcacccgtaatctgtaa

SEQ ID NO: 3922 - DNA, 2217 bp, Artificial Sequence
  Description of Artificial Sequence: Synthetic polynucleotide
atggctgccgatggttatcttccagattggctcgaggacaacctctctgagggcattcgcgagtggtgggcgctgaaacctggagccccgaagcccaaagccaaccagcaaaagcaggacgacggccggggtctggtgcttcctggctacaagtacctcggacccttcaacggactcgacaagggggagcccgtcaacgcggcggacgcggcggccctcgagcacgacaaggcctacgaccagcagctgcaggcgggtgacaatccgtacctgcggtataaccacgccgacgccgagtttcaggagcgtctgcaagaagatacgtcttttgggggcaacctcgggcgagcagtcttccaggccaagaagcgggttctcgaacctctcggtctggttgaggaaggcgctaagacggctcctggaaagaagagaccggtagagccatcaccccagcgttctccagactcctctacgggcatcggcaagaagggccaacagcccgccagaaaaagactcaattttggtcagactggcgactcagagtcagttccagaccctcaacctctcggagaacctccagcagcgccctctggtgtgggacctaatacaatggctgcaggcggtggcgcaccaatggcagacaataacgaaggcgccgacggagtgggtagttcctcgggaaattggcattgcgattccacatggctgggcgacagagccatcaccaccagcacccgaacctgggccctgcccacctacaacaaccacctctacaagcaaatctccaacgggacatcgggaggagccaccaacgacaacacctacttcggctacagcaccccctgggggtattttgactttaacagattccactgccacttttcaccacgtgactggcagcgactcatcaacaacaactggggattccggcccaagagactcagcttcaagctcttcaacatccaggtcaaggaggtcacgcagaatgaaggcaccaagaccatcgccaataacctcaccagcaccatccaggtgtttacggactcggagtaccagctgccgtacgttctcggctctgcccaccagggctgcctgcctccgttcccggcggacgtgttcacgattccccagtacggctacctaacactcaacaacggtagtcaggccgtgggacgctcctccttctactgcctggaatactttccttcgcagatgctgagaaccggcaacaacttccagtttacttacaccttcgaggacgtgcctttccacagcagctacgcccacagccagagcttggaccggctgatgaatcctctgattgaccagtacctgtactacttgtctcggattcaaacaacaggaggcacggcaaatacgcagactctgggcttcagccaaggtgggcctaatacaatggccaatcaggcaaagaactggctgccaggaccctgttaccgccaacaacgcgtctcaacgacaaccgggcaaaacaacaatagcaactttgcctggactgctgggaccaaataccatctgaatggaagaaattcattggctaatcctggcatcgctatggcaacacacaaagacgacgaggagcgtttttttcccagtaacgggatcctgatttttggcaaacaaaatgctgccagagacaatgcggattacagcgatgtcatgcccaccagcgaggaagaaatcaaaaccactaaccctgtggccacagaggaatacggtatcgtggcagataacttgcagcagcaaaacacggctcctcaaattggaactgtcaacagccagggggccttacccggtatggtctggcagaaccgggacgtgtacctgcagggtcccatctgggccaagattcctcacacggacggcaacttccacccgtctccgctgatgggcggctttggcctgaaacatcctccgcctcagatcctgatcaagaacacgcctgtacctgcggatcctccgaccaccttcaaccagtcaaagctgaactctttcatcacgcaatacagcaccggacaggtcagcgtggaaattgaatgggagctgcagaaggaaaacagcaagcgctggaaccccgagatccagtacacctccaactactacaaatctacaagtgtggactttgctgttaatacagaaggcgtgtactctgaaccccgccccattggcacccgttacctcacccgtaatctgtaa

SEQ ID NO: 3923 - DNA, 2217 bp, Artificial Sequence
  Description of Artificial Sequence: Synthetic polynucleotide
atggctgccgatggttatcttccagattggctcgaggacaacctctctgagggcattcgcgagtggtgggcgctgaaacctggagccccgaagcccaaagccaaccagcaaaagcaggacgacggccggggtctggtgcttcctggctacaagtacctcggacccttcaacggactcgacaagggggagcccgtcaacgcggcggacgcggcggccctcgagcacgacaaggcctacgaccagcagctgcaggcgggtgacaatccgtacctgcggtataaccacgccgacgccgagtttcaggagcgtctgcaagaagatacgtcttttgggggcaacctcgggcgagcagtcttccaggccaagaagcgggttctcgaacctctcggtctggttgaggaaggcgctaagacggctcctggaaagaagagaccggtagagccatcaccccagcgttctccagactcctctacgggcatcggcaagaagggccaacagcccgccagaaaaagactcaattttggtcagactggcgactcagagtcagttccagaccctcaacctctcggagaacctccagcagcgccctctggtgtgggacctaatacaatggctgcaggcggtggcgcaccaatggcagacaataacgaaggcgccgacggagtgggtagttcctcgggaaattggcattgcgattccacatggctgggcgacagagtcatcaccaccagcacccgaacctgggccctgcccacctacaacaaccacctctacaagcaaatctccaacgggacatcgggaggagccaccaacgacaacacctacttcggctacagcaccccctgggggtattttgactttaacagattccactgccacttttcaccacgtgactggcagcgactcatcaacaacaactggggattccggcccaagagactcagcttcaagctcttcaacatccaggtcaaggaggtcacgcagaatgaaggcaccaagaccatcgccaataacctcaccagcaccatccaggtgtttacggactcggagtaccagctgccgtacgttctcggctctgcccaccagggctgcctgcctccgttcccggcggacgtgttcacgattccccagtacggctacctaacactcaacaacggtagtcaggccgtgggacgctcctccttctactgcctggaatactttccttcgcagatgctgagaaccggcaacaacttccagtttacttacaccttcgaggacgtgcctttccacagcagctacgcccacagccagagcttggaccggctgatgaatcctctgattgaccagtacctgtactacttgtctcggattcaaacaacaggaggcacggcaaatacgcagactctgggcttcagccaaggtgggcctaatacaatggccaatcaggcaaagaactggctgccaggaccctgttaccgccaacaacgcgtctcaacgacaaccgggcaaaacaacaatagcaactttgcctggactgctgggaccaaataccatctgaatggaagaaattcattggctaatcctggcgtcgctatggcaacacacaaagacgacgaggagcgtttttttcccagtaacgggatcctgatttttggcaaacaaaatgctgccagagacaatgcggattacagcgatgtcatgcccaccagcgaggaagaaatcaaaaccactaaccctgtggccacagaggaatacggtatcgtggcagataacttgcagcagcaaaacacggctcctcaaattggaactgtcaacagccagggggccttacccggtatggtctggcagaaccgggacgtgtacctgcagggtcccatctgggccaagattcctcacacggacggcaacttccacccgtctccgctgatgggcggctttggcctgaaacatcctccgcctcagatcctgatcaagaacacgcctgtacctgcggatcctccgaccaccttcaaccagtcaaagctgaactctttcatcacgcaatacagcaccggacaggtcagcgtggaaattgaatgggagctgcagaaggaaaacagcaagcgctggaaccccgagatccagtacacctccaactactacaaatctacaagtgtggactttgctgttaatacagaaggcgtgtactctgaaccccgccccattggcacccgttacctcacccgtaatctgtaa

SEQ ID NO: 3924 - DNA, 2217 bp, Artificial Sequence
  Description of Artificial Sequence: Synthetic polynucleotide
atggctgccgatggttatcttccagattggctcgaggacaacctctctgagggcattcgcgagtggtgggcgctgaaacctggagccccgaagcccaaagccaaccagcaaaagcaggacgacggccggggtctggtgcttcctggctacaagtacctcggacccttcaacggactcgacaagggggagcccgtcaacgcggcggacgcggcggccctcgagcacgacaaggcctacgaccagcagctgcaggcgggtgacaatccgtacctgcggtataaccacgccgacgccgagtttcaggagcgtctgcaagaagatacgtcttttgggggcaacctcgggcgagcagtcttccaggccaagaagcgggttctcgaacctctcggtctggttgaggaaggcgctaagacggctcctggaaagaagagaccggtagagccatcaccccagcgttctccagactcctctacgggcatcggcaagaagggccaacagcccgccagaaaaagactcaattttggtcagactggcgactcagagtcagttccagaccctcaacctctcggagaacctccagcagcgccctctggtgtgggacctaatacaatggctgcaggcggtggcgcaccaatggcagacaataacgaaggcgccgacggagtgggtagttcctcgggaaattggcattgcgattccacatggctgggcgacagagtcatcaccaccagcacccgaacctgggccctgcccacctacaacaaccacctctacaagcaaatctccaacgggacatcgggaggagccaccaacgacaacacctacttcggctacagcaccccctgggggtattttgactttaacagattccactgccacttttcaccacgtgactggcagcgactcatcaacaacaactggggattccggcccaagagactcagcttcaagctcttcaacatccaggtcaaggaggtcacgcagaatgaaggcaccaagaccatcgccaataacctcaccggcaccatccaggtgtttacggactcggagtaccagctgccgtacgttctcggctctgcccaccagggctgcctgcctccgttcccggcggacgtgttcacgattccccagtacggctacctaacactcaacaacggtagtcaggccgtgggacgctcctccttctactgcctggaatactttccttcgcagatgctgagaaccggcaacaacttccagtttacttacaccttcgaggacgtgcctttccacagcagctacgcccacagccagagcttggaccggctgatgaatcctctgattgaccagtacctgtactacttgtctcggattcaaacaacaggaggcacggcaaatacgcagactctgggcttcagccaaggtgggcctaatacaatggccaatcaggcaaagaactggctgccaggaccctgttaccgccaacaacgcgtctcaacgacaaccgggcaaaacaacaatagcaactttgcctggactgctgggaccaaataccatctgaatggaagaaattcattggctaatcctggcatcgctatggcaacacacaaagacgacgaggagcgtttttttcccagtaacgggatcctgatttttggcaaacaaaatgctgccagagacaatgcggattacagcgatgtcatgcccaccagcgaggaagaaatcaaaaccactaaccctgtggccacagaggaatacggtatcgtggcagataacttgcagcagcaaaacacggctcctcaaattggaactgtcaacagccagggggccttacccggtatggtctggcagaaccgggacgtgtacctgcagggtcccatctgggccaagattcctcacacggacggcaacttccacccgtctccgctgatgggcggctttggcctgaaacatcctccgcctcagatcctgatcaagaacacgcctgtacctgcggatcctccgaccaccttcaaccagtcaaagctgaactctttcatcacgcaatacagcaccggacaggtcagcgtggaaattgaatgggagctgcagaaggaaaacagcaagcgctggaaccccgagatccagtacacctccaactactacaaatctacaagtgtggactttgctgttaatacagaaggcgtgtactctgaaccccgccccattggcacccgttacctcacccgtaatctgtaa

SEQ ID NO: 3925 - DNA, 2217 bp, Artificial Sequence
  Description of Artificial Sequence: Synthetic polynucleotide
atggctgccgatggttatcttccagattggctcgaggacaacctctctgagggcattcgcgagtggtgggcgctgaaacctggagccccgaagcccaaagccaaccagcaaaagcaggacgacggccggggtctggtgcttcctggctacaagtacctcggacccttcaacggactcgacaagggggagcccgtcaacgcggcggacgcggcggccctcgagcacgacaaggcctacgaccagcagctgcaggcgggtgacaatccgtacctgcggtataaccacgccgacgccgagtttcaggagcgtctgcaagaagatacgtcttttgggggcaacctcgggcgagcagtcttccaggccaagaagcgggttctcgaacctctcggtctggttgaggaaggcgctaagacggctcctggaaagaagagaccggtagagccatcaccccagcgttctccagactcctctacgggcatcggcaagaagggccaacagcccgccagaaaaagactcaattttggtcagactggcgactcagagtcagttccagaccctcaacctctcggagaacctccagcagcgccctctggtgtgggacctaatacaatggctgcaggcggtggcgcaccaatggcagacaataacgaaggcgccgacggagtgggtagttcctcgggaaattggcattgcgattccacatggctgggcgacagagtcatcaccaccagcacccgaacctgggccctgcccacctacaacaaccacctctacaagcaaatctccaacgggacatcgggaggagccaccaacgacaacacctacttcggctacagcaccccctgggggtattttgactttaacagattccactgccacttttcaccacgtgactggcagcgactcatcaacaacaactggggattccggcccaagagactcagcttcaagctcttcaacatccaggtcaaggaggtcacgcagaatgaaggcaccaagaccatcgccaataacctcaccagcaccatccaggtgtttacggactcggagtaccagctgccgtacgttctcggctctgcccaccagggctgcctgcctccgttcccggcggacgtgttcacgattccccagtacggctacctaacactcaacaacggtagtcaggccgtgggacgctcctccttctactgcctggaatactttccttcgcagatgctgagaaccggcaacaacttccagtttacttacaccttcgaggacgtgcctttccacagcagctacgcccacagccagagcttggaccggctgatgaatcctctgattgaccagtacctgtactacttgtctcggattcaaacaacaggaggcacggcaaatacgcagactctgggcttcagccaaggtgggcctaatacaatggccaatcaggcaaagaactggctgccaggaccctgttaccgccaacaacgcgtctcaacgacaaccgggcaaaacaacaatagcaactttgcctggactgctgggaccaaataccatctgaatggaagaaattcattggctaatcctggcatcgctatggcaacacacaaagacgacgaggagcgtttttttcccagtaacgggatcctgatttttggcaaacaaaatgctgtcagagacaatgcggattacagcgatgtcatgcccaccagcgaggaagaaatcaaaaccactaaccctgtggccacagaggaatacggtatcgtggcagataacttgcagcagcaaaacacggctcctcaaattggaactgtcaacagccagggggccttacccggtatggtctggcagaaccgggacgtgtacctgcagggtcccatctgggccaagattcctcacacggacggcaacttccacccgtctccgctgatgggcggctttggcctgaaacatcctccgcctcagatcctgatcaagaacacgcctgtacctgcggatcctccgaccaccttcaaccagtcaaagctgaactctttcatcacgcaatacagcaccggacaggtcagcgtggaaattgaatgggagctgcagaaggaaaacagcaagcgctggaaccccgagatccagtacacctccaactactacaaatctacaagtgtggactttgctgttaatacagaaggcgtgtactctgaaccccgccccattggcacccgttacctcacccgtaatctgtaa

SEQ ID NO: 3926 - DNA, 2217 bp, Artificial Sequence
  Description of Artificial Sequence: Synthetic polynucleotide
atggctgccgatggttatcttccagattggctcgaggacaacctctctgagggcattcgcgagtggtgggcgctgaaacctggagccccgaagcccaaagccaaccagcaaaagcaggacgacggccggggtctggtgcttcctggctacaagtacctcggacccttcaacggactcgacaagggggagcccgtcaacgcggcggacgcggcggccctcgagcacgacaaggcctacgaccagcagctgcaggcgggtgacaatccgtacctgcggtataaccacgccgacgccgagtttcaggagcgtctgcaagaagatacgtcttttgggggcaacctcgggcgagcagtcttccaggccaagaagcgggttctcgaacctctcggtctggttgaggaaggcgctaagacggctcctggaaagaagagaccggtagagccatcaccccagcgttctccagactcctctacgggcatcggcaagaagggccaacagcccgccagaaaaagactcaattttggtcagactggcgactcagagtcagttccagaccctcaacctctcggagaacctccagcagcgccctctggtgtgggacctaatacaatggctgcaggcggtggcgcaccaatggcagacaataacgaaggcgccgacggagtgggtagttcctcgggaaattggcattgcgattccacatggctgggcgacagagtcatcaccaccagcacccgaacctgggccctgcccacctacaacaaccacctctacaagcaaatctccaacgggacatcgggaggagccaccaacgacaacacctacttcggctacagcaccccctgggggtattttgactttaacagattccactgccacttttcaccacgtgactggcagcgactcatcaacaacaactggggattccggcccaagagactcagcttcaagctcttcaacatccaggtcaaggaggtcacgcagaatgaaggcaccaagaccatcgccaataacctcaccagcaccatccaggtgtttacggactcggagtaccagctgccgtacgttctcggctctgcccaccagggctgcctgcctccgttcccggcggacgtgttcacgattccccagtacggctacctaacactcaacaacggtagtcaggccgtgggacgctcctccttctactgcctggaatactttccttcgcagatgctgagaaccggcaacaacttccagtttacttacaccttcgaggacgtgcctttccacagcagctacgcccacagccagagcttggaccggctgatgaatcctctgattgaccagtacctgtactacttgtctcggattcaaacaacaggaggcacggcaaatacgcagactctgggcttcagccaaggtgggcctaatacaatggccaatcaggcaaagaactggctgccaggaccctgttaccgccaacaacgcgtctcaacgacaaccgggcaaaacaacaatagcaactttgcctggactgctgggaccaaataccatctgaatggaagaaattcattggctaatcctggcatcgctatggcaacacacaaagacgacgaggagcgtttttttcccagtaacgggatcctgatttttggcaaacaaaatgctgccagagacaatgcggattacagcgatgtcatgcccaccagcgaggaagaaatcaaaaccactaaccctgtggccacagaggaatacggtatcgtggcagataacttgcagcagcaaaacacggctcctcaaattggaactgtcaacagccagggggccttacccggtatggtctggcagaaccgggacgtgtacctgcagggtcccatctgggccaagattcctcacacggacggcaacttccacccgtctccgctgatgggcggctttggcctgaaacatcctccgcctcagatcctgatcaagaacacgcctgtacctgcggatcctccgaccaccttcaaccagtcaaagctgaactctttcatcgcgcaatacagcaccggacaggtcagcgtggaaattgaatgggagctgcagaaggaaaacagcaagcgctggaaccccgagatccagtacacctccaactactacaaatctacaagtgtggactttgctgttaatacagaaggcgtgtactctgaaccccgccccattggcacccgttacctcacccgtaatctgtaa

SEQ ID NO: 3927 - DNA, 2217 bp, Artificial Sequence
  Description of Artificial Sequence: Synthetic polynucleotide
atggctgccgatggttatcttccagattggctcgaggacaacctctctgagggcattcgcgagtggtgggcgctgaaacctggagccccgaagcccaaagccaaccagcaaaagcaggacgacggccggggtctggtgcttcctggctacaagtacctcggacccttcaacggactcgacaagggggagcccgtcaacgcggcggacgcggcggccctcgagcacgacaaggcctacgaccagcagctgcaggcgggtgacaatccgtacctgcggtataaccacgccgacgccgagtttcaggagcgtctgcaagaagatacgtcttttgggggcaacctcgggcgagcagtcttccaggccaagaagcgggttctcgaacctctcggtctggttgaggaaggcgctaagacggctcctggaaagaagagaccggtagagccatcaccccagcgttctccagactcctctacgggcatcggcaagaagggccaacagcccgccagaaaaagactcaattttggtcagactggcgactcagagtcagttccagaccctcaacctctcggagaacctccagcagcgccctctggtgtgggacctaatacaatggctgcaggcggtggcgcaccaatggcagacaataacgaaggcgccgacggagtgggtagttcctcgggaaattggcattgcgattccacatggctgggcgacagagtcatcaccaccagcacccgaacctgggccctgcccacctacaacaaccacctctacaagcaaatctccaacgggacatcgggaggagccaccaacgacaacacctacttcggctacagcaccccctgggggtattttgactttaacagattccactgccacttttcaccacgtgactggcagcgactcatcaacaacaactggggattccggcccaagagactcagcttcaagctcttcaacatccaggtcaaggaggtcacgcagaatgaaggcaccaagaccatcgccaataacctcaccagcaccatccaggtgtttacggactcggagtaccagctgccgtacgttctcggctctgcccaccagggctgcctgcctccgttcccggcggacgtgttcacgattccccagtacggctacctaacactcaacaacggtagtcaggccgtgggacgctcctccttctactgcctggaatactttccttcgcagatgctgagaaccggcaacaacttccagtttacttacaccttcgaggacgtgcctttccacagcagctacgcccacagccagagcttggaccggctgatgaatcctctgattgaccagtacctgtactacttgtctcggattcaaacaacaggaggcacggcaaatacgcagactctgggcttcagccaaggtgggcctaatacaatggccaatcaggcaaagaactggctgccaggaccctgttaccgccaacaacgcgtctcaacgacaaccgggcaaaacaacaatagcaactttgcctggactgctgggaccaaataccatctgaatggaagaaattcattggctaatcctggcatcgctatggcaacacacaaagacggcgaggagcgtttttttcccagtaacgggatcctgatttttggcaaacaaaatgctgccagagacaatgcggattacagcgatgtcatgcccaccagcgaggaagaaatcaaaaccactaaccctgtggccacagaggaatacggtatcgtggcagataacttgcagcagcaaaacacggctcctcaaattggaactgtcaacagccagggggccttacccggtatggtctggcagaaccgggacgtgtacctgcagggtcccatctgggccaagattcctcacacggacggcaacttccacccgtctccgctgatgggcggctttggcctgaaacatcctccgcctcagatcctgatcaagaacacgcctgtacctgcggatcctccgaccaccttcaaccagtcaaagctgaactctttcatcacgcaatacagcaccggacaggtcagcgtggaaattgaatgggagctgcagaaggaaaacagcaagcgctggaaccccgagatccagtacacctccaactactacaaatctacaagtgtggactttgctgttaatacagaaggcgtgtactctgaaccccgccccattggcacccgttacctcacccgtaatctgtaa

SEQ ID NO: 3928 - DNA, 2217 bp, Artificial Sequence
  Description of Artificial Sequence: Synthetic polynucleotide
atggctgccgatggttatcttccagattggctcgaggacaacctctctgagggcattcgcgagtggtgggcgctgaaacctggagccccgaagcccaaagccaaccagcaaaagcaggacgacggccggggtctggtgcttcctggctacaagtacctcggacccttcaacggactcgacaagggggagcccgtcaacgcggcggacgcggcggccctcgagcacgacaaggcctacgaccagcagctgcaggcgggtgacaatccgtacctgcggtataaccacgccgacgccgagtttcaggagcgtctgcaagaagatacgtcttttgggggcaacctcgggcgagcagtcttccaggccaagaagcgggttctcgaacctctcggtctggttgaggaaggcgctaagacggctcctggaaagaagagaccggtagagccatcaccccagcgttctccagactcctctacgggcatcggcaagaagggccaacagcccgccagaaaaagactcaattttggtcagactggcgactcagagtcagttccagaccctcaacctctcggagaacctccagcagcgccctctggtgtgggacctaatacaatggctgcaggcggtggcgcaccaatggcagacaataacgaaggcgccgacggagtgggtagttcctcgggaaattggcattgcgattccacatggctgggcgacagagtcatcaccaccagcacccgaacctgggccctgcccacctacaacaaccacctctacaagcaaatctccaacgggacatcgggaggagccaccaacgacaacacctacttcggctacagcaccccctgggggtattttgactttaacagattccactgccacttttcaccacgtgactggcagcgactcatcaacaacaactggggattccggcccaagagactcagcttcaagctcttcaacatccaggtcaaggaggtcacgcagaatgaaggcaccaagaccatcgccaataacctcaccagcaccatccaggtgtttacggactcggagtaccagctgccgtacgttctcggctctgcccaccagggctgcctgcctccgttcccggcggacgtgttcacgattccccagtacggctacctaacactcaacaacggtagtcaggccgtgggacgctcctccttctactgcctggaatactttccttcgcagatgctgagaaccggcaacaacttccagtttacttacaccttcgaggacgtgcctttccacagcagctacgcccacagccagagcttggaccggctgatgaatcctctgattgaccagtacctgtactacttgtctcggattcaaacaacaggaggcacggcaaatacgcagactctgggcttcagccaaggtgggcctaatacaatggccaatcaggcaaagaactggctgccaggaccctgttaccgccaacaacgcgtctcaacgacaaccgggcaaaacaacaatagcaactttgcctggactgctgggaccaaataccatctgaatggaagaaattcattggctaatcctggcatcgctatggcaacacacaaaggcgacgaggagcgtttttttcccagtaacgggatcctgatttttggcaaacaaaatgctgccagagacaatgcggattacagcgatgtcatgcccaccagcgaggaagaaatcaaaaccactaaccctgtggccacagaggaatacggtatcgtggcagataacttgcagcagcaaaacacggctcctcaaattggaactgtcaacagccagggggccttacccggtatggtctggcagaaccgggacgtgtacctgcagggtcccatctgggccaagattcctcacacggacggcaacttccacccgtctccgctgatgggcggctttggcctgaaacatcctccgcctcagatcctgatcaagaacacgcctgtacctgcggatcctccgaccaccttcaaccagtcaaagctgaactctttcatcacgcaatacagcaccggacaggtcagcgtggaaattgaatgggagctgcagaaggaaaacagcaagcgctggaaccccgagatccagtacacctccaactactacaaatctacaagtgtggactttgctgttaatacagaaggcgtgtactctgaaccccgccccattggcacccgttacctcacccgtaatctgtaa

SEQ ID NO: 3929 - DNA, 2217 bp, Artificial Sequence
  Description of Artificial Sequence: Synthetic polynucleotide
atggctgccgatggttatcttccagattggctcgaggacaacctctctgagggcattcgcgagtggtgggcgctgaaacctggagccccgaagcccaaagccaaccagcaaaagcaggacgacggccggggtctggtgcttcctggctacaagtacctcggacccttcaacggactcgacaagggggagcccgtcaacgcggcggacgcggcggccctcgagcacgacaaggcctacaaccagcagctgcaggcgggtgacaatccgtacctgcggtataaccacgccgacgccgagtttcaggagcgtctgcaagaagatacgtcttttgggggcaacctcgggcgagcagtcttccaggccaagaagcgggttctcgaacctctcggtctggttgaggaaggcgctaagacggctcctggaaagaagagaccggtagagccatcaccccagcgttctccagactcctctacgggcatcggcaagaagggccaacagcccgccagaaaaagactcaattttggtcagactggcgactcagagtcagttccagaccctcaacctctcggagaacctccagcagcgccctctggtgtgggacctaatacaatggctgcaggcggtggcgcaccaatggcagacaataacgaaggcgccgacggagtgggtagttcctcgggaaattggcattgcgattccacatggctgggcgacagagtcatcaccaccagcacccgaacctgggccctgcccacctacaacaaccacctctacaagcaaatctccaacgggacatcgggaggagccaccaacgacaacacctacttcggctacagcaccccctgggggtattttgactttaacagattccactgccacttttcaccacgtgactggcagcgactcatcaacaacaactggggattccggcccaagagactcagcttcaagctcttcaacatccaggtcaaggaggtcacgcagaatgaaggcaccaagaccatcgccaataacctcaccagcaccatccaggtgtttacggactcggagtaccagctgccgtacgttctcggctctgcccaccagggctgcctgcctccgttcccggcggacgtgttcacgattccccagtacggctacctaacactcaacaacggtagtcaggccgtgggacgctcctccttctactgcctggaatactttccttcgcagatgctgagaaccggcaacaacttccagtttacttacaccttcgaggacgtgcctttccacagcagctacgcccacagccagagcttggaccggctgatgaatcctctgattgaccagtacctgtactacttgtctcggattcaaacaacaggaggcacggcaaatacgcagactctgggcttcagccaaggtgggcctaatacaatggccaatcaggcaaagaactggctgccaggaccctgttaccgccaacaacgcgtctcaacgacaaccgggcaaaacaacaatagcaactttgcctggactgctgggaccaaataccatctgaatggaagaaattcattggctaatcctggcatcgctatggcaacacacaaagacgacgaggagcgtttttttcccagtaacgggatcctgatttttggcaaacaaaatgctgccagagacaatgcggattacagcgatgtcatgcccaccagcgaggaagaaatcaaaaccactaaccctgtggccacagaggaatacggtatcgtggcagataacttgcagcagcaaaacacggctcctcaaattggaactgtcaacagccagggggccttacccggtatggtctggcagaaccgggacgtgtacctgcagggtcccatctgggccaagattcctcacacggacggcaacttccacccgtctccgctgatgggcggctttggcctgaaacatcctccgcctcagatcctgatcaagaacacgcctgtacctgcggatcctccgaccaccttcaaccagtcaaagctgaactctttcatcacgcaatacagcaccggacaggtcagcgtggaaattgaatgggagctgcagaaggaaaacagcaagcgctggaaccccgagatccagtacacctccaactactacaaatctacaagtgtggactttgctgttaatacagaaggcgtgtactctgaaccccgccccattggcacccgttacctcacccgtaatctgtaa

SEQ ID NO: 3930 - DNA, 2217 bp, Artificial Sequence
  Description of Artificial Sequence: Synthetic polynucleotide
atggctgccgatggttatcttccagattggctcgaggacaacctctctgagggcattcgcgagtggtgggcgctgaaacctggagccccgaagcccaaagccaaccagcaaaagcaggacgacggccggggtctggtgcttcctggctacaagtacctcggacccttcaacggactcgacaagggggagcccgtcaacgcggcggacgcggcggccctcgagcacgacaaggcctacgaccagcagctgcaggcgggtgacaatccgtacctgcggtataaccacgccgacgccgagtttcaggagcgtctgcaagaagatacgtcttttgggggcaacctcgggcgagcagtcttccaggccaagaagcgggttctcgaacctctcggtctggttgaggaaggcgctaagacggctcctggaaagaagagaccggtagagccatcaccccagcgttctccagactcctctacgggcatcggcaagaagggccaacagcccgccagaaaaagactcaattttggtcagactggcgactcagagtcagttccagaccctcaacctctcggagaacctccagcagcgccctctggtgtgggacctaatacaatggctgcaggcggtggcgcaccaatggcagacaataacgaaggcgccgacggagtgggtagttcctcgggaaattggcattgcgattccacatggctgggcgacagagtcatcaccaccagcacccgaacctgggccctgcccacctacaacaaccacctctacaagcaaatctccaacgggacatcgggaggagccaccaacgacaacacctacttcggctacagcaccccctgggggtattttgactttaacagattccactgccacttttcaccacgtgactggcagcgactcatcaacaacaactggggattccggcccaagagactcagcttcaagctcttcaacatccaggtcaaggaggtcacgcagaatgaaggcaccaagaccatcgccaataacctcaccagcaccatccaggtgtttacggactcggagtaccagctgccgtacgttctcggctctgcccaccagggctgcctgcctccgttcccggcggacgtgttcacgattccccagtacggctacctaacactcaacaacggtagtcaggccgtgggacgctcctccttctactgcctggaatactttccttcgcagatgctgagaaccggcaacaacttccagtttacttacaccttcgaggacgtgcctttccacagcagctacgcccacagccagagcttggaccggctgatgaatcctctgattgaccagtacctgtactacttgtctcggattcaaacaacaggaggcacggcaaatacgcagactctgggcttcagccaaggtgggcctaatacaatggccaatcaggcaaagaactggctgccaggaccctgttaccgccaacaacgcgtctcaacgacaaccgggcaaaacaacaatagcaactttgcctggactgctgggaccaaataccatctgaatggaagaaattcattggctaatcctggcatcgctatggcaacacacaaagacgacgaggagcgtttttttcccagtaacgggatcctgatttttggcaaacaaaatgctgccagagacaatgcggattacagcgatgtcatgcccaccagcgaggaagaaatcaaaaccactaaccctgtggccacagaggaatacggtatcgtggcagataacttgcagcagcaaaacacggctcctcaaattggaactgtcaacagccagggggccttacccggtatggtctggcagaaccgggacgtgtacctgcagggtcccacctgggccaagattcctcacacggacggcaacttccacccgtctccgctgatgggcggctttggcctgaaacatcctccgcctcagatcctgatcaagaacacgcctgtacctgcggatcctccgaccaccttcaaccagtcaaagctgaactctttcatcacgcaatacagcaccggacaggtcagcgtggaaattgaatgggagctgcagaaggaaaacagcaagcgctggaaccccgagatccagtacacctccaactactacaaatctacaagtgtggactttgctgttaatacagaaggcgtgtactctgaaccccgccccattggcacccgttacctcacccgtaatctgtaa

SEQ ID NO: 3931 - DNA, 2217 bp, Artificial Sequence
  Description of Artificial Sequence: Synthetic polynucleotide
atggctgccgatggttatcttccagattggctcgaggacaacctctctgagggcattcgcgagtggtgggcgctgaaacctggagccccgaagcccaaagccaaccagcaaaagcaggacgacggccggggtctggtgcttcctggctacaagtacctcggacccttcaacggactcgacaagggggagcccgtcaacgcggcggacgcggcggccctcgagcacgacaaggcctacgaccagcagctgcaggcgggtgacaatccgtacctgcggtataaccacgccgacgccgagtttcaggagcgtctgcaagaagatacgtcttttgggggcaacctcgggcgagcagtcttccaggccaagaagcgggttctcgaacctctcggtctggttgaggaaggcgctaagacggctcctggaaagaagagaccggtagagccatcaccccagcgttctccagactcctctacgggcatcggcaagaagggccaacagcccgccagaaaaagactcaattttggtcagactggcgactcagagtcagttccagaccctcaacctctcggagaacctccagcagcgccctctggtgtgggacctaatacaatggctgcaggcggtggcgcaccaatggcagacaataacgaaggcgccgacggagtgggtagttcctcgggaaattggcattgcgattccacatggctgggcgacagagtcatcaccaccagcacccgaacctgggccctgcccacctacaacaaccacctctacaagcaaatctccaacgggacatcgggaggagccaccaacgacaacacctacttcggctacagcaccccctgggggtattttgactttaacagattccactgccacttttcaccacgtgactggcagcgactcatcaacaacaactggggattccggcccaagagactcagcttcaagctcttcaacatccaggtcaaggaggtcacgcagaatgaaggcaccaagaccatcgccaataacctcaccagcaccatccaggtgtttacggactcggagtaccagctgccgtacgttctcggctctgcccaccagggctgcctgcctccgttcccggcggacgtgttcacgattccccagtacggctacctaacactcaacaacggtagtcaggccgtgggacgctcctccttctactgcctggaatactttccttcgcagatgctgagaaccggcaacaacttccagtttacttacaccttcgaggacgtgcctttccacagcagctacgcccacagccagagcttggaccggctgatgaatcctctgattgaccagtacctgtactacttgtctcggattcaaacaacaggaggcacggcaaatacgcagactctgggcttcagccaaggtgggcctaatacaatggccaatcaggcaaagaactggctgccaggaccctgttaccgccaacaacgcgtctcaacgacaaccgggcaaaacaacaatagcaactttgcctggactgctgggaccaaataccatctgaatggaagaaattcattggctaatcctggcatcgctatggcaacacacaaagacgacgaggagcgtttttttcccagtaacgggatcctgatttttggcaaacaaaatgctgccagagacaatgcggattacagcgatgtcatgcccaccagcgaggaagaaatcaaaaccactaaccctgtggccacagaggaatacggtatcgtggcagataacttgcggcagcaaaacacggctcctcaaattggaactgtcaacagccagggggccttacccggtatggtctggcagaaccgggacgtgtacctgcagggtcccatctgggccaagattcctcacacggacggcaacttccacccgtctccgctgatgggcggctttggcctgaaacatcctccgcctcagatcctgatcaagaacacgcctgtacctgcggatcctccgaccaccttcaaccagtcaaagctgaactctttcatcacgcaatacagcaccggacaggtcagcgtggaaattgaatgggagctgcagaaggaaaacagcaagcgctggaaccccgagatccagtacacctccaactactacaaatctacaagtgtggactttgctgttaatacagaaggcgtgtactctgaaccccgccccattggcacccgttacctcacccgtaatctgtaa

SEQ ID NO: 3932 - DNA, 2217 bp, Artificial Sequence
  Description of Artificial Sequence: Synthetic polynucleotide
atggctgccgatggttatcttccagattggctcgaggacaacctctctgagggcattcgcgagtggtgggcgctgaaacctggagccccgaagcccaaagccaaccagcaaaagcaggacgacggccggggtctggtgcttcctggctacaagtacctcggacccttcaacggactcgacaagggggagcccgtcaacgcggcggacgcggcggccctcgagcacgacaaggcctacgaccagcagctgcaggcgggtgacaatccgtacctgcggtataaccacgccgacgccgagtttcaggagcgtctgcaagaagatacgtcttttgggggcaacctcgggcgagcagtcttccaggccaagaagcgggttctcgaacctctcggtctggttgaggaaggcgctaagacggctcctggaaagaagagaccggtagagccatcaccccagcgttctccagactcctctacgggcatcggcaagaagggccaacagcccgccagaaaaagactcaattttggtcagactggcgactcagagtcagttccagaccctcaacctctcggagaacctccagcagcgccctctggtgtgggacctaatacaatggctgcaggcggtggcgcaccaatggcagacaataacgaaggcgccgacggagtgggtagttcctcgggaaattggcattgcgattccacatggctgggcgacagagtcatcaccaccagcacccgaacctgggccctgcccacctacaacaaccacctctacaagcaaatctccaacgggacatcgggaggagccaccaacgacaacacctacttcggctacagcaccccctgggggtattttgactttaacagattccactgccacttttcaccacgtgactggcagcgactcatcaacaacaactggggattccggcccaagagactcagcttcaagctcttcaacatccaggtcaaggaggtcacgcagaatgaaggcaccaagaccatcgccaataacctcaccagcaccatccaggtgtttacggactcggagtaccagctgccgtacgttctcggctctgcccaccagggctgcctgcctccgttcccggcggacgtgttcacgattccccagtacggctacctaacactcaacaacggtagtcaggccgtgggacgctcctccttctactgcctggaatactttccttcgcagatgctgagaaccggcaacaacttccagtttacttacaccttcgaggacgtgcctttccacagcagctacgcccacagccagagcttggaccggctgatgaatcctctgattgaccagtacctgtactacttgtctcggattcaaacaacaggaggcacggcaaatacgcagactctgggcttcagccaaggtgggcctaatacaatggccaatcaggcaaagaactggctgccaggaccctgttaccgccaacaacgcgtctcaacgacaaccgggcaaaacaacaatagcaactttgcctggactgctgggaccaaataccatctgaatggaagaaattcattggctaatcctggcatcgctatggcaacacacaaagacgacgaggagcgtttttttcccagtaacgggatcctgatttttggcaaacaaaatgctgccagagacaatgcggattacagcgatgccatgcccaccagcgaggaagaaatcaaaaccactaaccctgtggccacagaggaatacggtatcgtggcagataacttgcagcagcaaaacacggctcctcaaattggaactgtcaacagccagggggccttacccggtatggtctggcagaaccgggacgtgtacctgcagggtcccatctgggccaagattcctcacacggacggcaacttccacccgtctccgctgatgggcggctttggcctgaaacatcctccgcctcagatcctgatcaagaacacgcctgtacctgcggatcctccgaccaccttcaaccagtcaaagctgaactctttcatcacgcaatacagcaccggacaggtcagcgtggaaattgaatgggagctgcagaaggaaaacagcaagcgctggaaccccgagatccagtacacctccaactactacaaatctacaagtgtggactttgctgttaatacagaaggcgtgtactctgaaccccgccccattggcacccgttacctcacccgtaatctgtaa

SEQ ID NO: 3933 - DNA, 2217 bp, Artificial Sequence
  Description of Artificial Sequence: Synthetic polynucleotide
atggctgccgatggttatcttccagattggctcgaggacaacctctctgagggcattcgcgagtggtgggcgctgaaacctggagccccgaagcccaaagccaaccagcaaaagcaggacgacggccggggtctggtgcttcctggctacaagtacctcggacccttcaacggactcgacaagggggagcccgtcaacgcggcggacgcggcggccctcgagcacgacaaggcctacgaccagcagctgcaggcgggtgacaatccgtacctgcggtataaccacgccgacgccgagtttcaggagcgtctgcaagaagatacgtcttttgggggcaacctcgggcgagcagtcttccaggccaagaagcgggttctcgaacctctcggtctggttgaggaaggcgctaagacggctcctggaaagaagagaccggtagagccatcaccccagcgttctccagactcctctacgggcatcggcaagaagggccaacagcccgccagaaaaagactcaattttggtcagactggcgactcagagtcagttccagaccctcaacctctcggagaacctccagcagcgccctctggtgtgggacctaatacaatggctgcaggcggtggcgcaccaatggcagacaataacgaaggcgccgacggagtgggtagttcctcgggaaattggcattgcgattccacatggctgggcgacagagtcatcaccaccagcacccgaacctgggccctgcccacctacaacaaccacctctacaagcaaatctccaacgggacatcgggaggagccaccaacggcaacacctacttcggctacagcaccccctgggggtattttgactttaacagattccactgccacttttcaccacgtgactggcagcgactcatcaacaacaactggggattccggcccaagagactcagcttcaagctcttcaacatccaggtcaaggaggtcacgcagaatgaaggcaccaagaccatcgccaataacctcaccagcaccatccaggtgtttacggactcggagtaccagctgccgtacgttctcggctctgcccaccagggctgcctgcctccgttcccggcggacgtgttcacgattccccagtacggctacctaacactcaacaacggtagtcaggccgtgggacgctcctccttctactgcctggaatactttccttcgcagatgctgagaaccggcaacaacttccagtttacttacaccttcgaggacgtgcctttccacagcagctacgcccacagccagagcttggaccggctgatgaatcctctgattgaccagtacctgtactacttgtctcggattcaaacaacaggaggcacggcaaatacgcagactctgggcttcagccaaggtgggcctaatacaatggccaatcaggcaaagaactggctgccaggaccctgttaccgccaacaacgcgtctcaacgacaaccgggcaaaacaacaatagcaactttgcctggactgctgggaccaaataccatctgaatggaagaaattcattggctaatcctggcatcgctatggcaacacacaaagacgacgaggagcgtttttttcccagtaacgggatcctgatttttggcaaacaaaatgctgccagagacaatgcggattacagcgatgtcatgcccaccagcgaggaagaaatcaaaaccactaaccctgtggccacagaggaatacggtatcgtggcagataacttgcagcagcaaaacacggctcctcaaattggaactgtcaacagccagggggccttacccggtatggtctggcagaaccgggacgtgtacctgcagggtcccatctgggccaagattcctcacacggacggcaacttccacccgtctccgctgatgggcggctttggcctgaaacatcctccgcctcagatcctgatcaagaacacgcctgtacctgcggatcctccgaccaccttcaaccagtcaaagctgaactctttcatcacgcaatacagcaccggacaggtcagcgtggaaattgaatgggagctgcagaaggaaaacagcaagcgctggaaccccgagatccagtacacctccaactactacaaatctacaagtgtggactttgctgttaatacagaaggcgtgtactctgaaccccgccccattggcacccgttacctcacccgtaatctgtaa

SEQ ID NO: 3934 - DNA, 2217 bp, Artificial Sequence
  Description of Artificial Sequence: Synthetic polynucleotide
atggctgccgatggttatcttccagattggctcgaggacaacctctctgagggcattcgcgagtggtgggcgctgaaacctggagccccgaagcccaaagccaaccagcaaaagcaggacgacggccggggtctggtgcttcctggctacaagtacctcggacccttcaacggactcgacaagggggagcccgtcaacgcggcggacgcggcggccctcgagcacgacaaggcctacgaccagcagctgcaggcgggtgacaatccgtacctgcggtataaccacgccgacgccgagtttcaggagcgtctgcaagaagatacgtcttttgggggcaacctcgggcgagcagtcttccaggccaagaagcgggttctcgaacctctcggtctggttgaggaaggcgctaagacggctcctggaaagaagagaccggtagagccatcaccccagcgttctccagactcctctacgggcatcggcaagaagggccaacagcccgccagaaaaagactcaattttggtcagactggcgactcagagtcagttccagaccctcaacctctcggagaacctccagcagcgccctctggtgtgggacctaatacaatggctgcaggcggtggcgcaccaatggcagacaataacgaaggcgccgacggagtgggtagttcctcgggaaattggcattgcgattccacatggctgggcgacagagtcatcaccaccagcacccgaacctgggccctgcccacctacaacaaccacctctacaagcaaatctccaacgggacatcgggaggagccaccaacgacaacacctacttcggctacagcaccccctgggggtattttgactttaacagattccactgccacttttcaccacgtgactggcagcgactcatcaacaacaactggggattccggcccaagagactcagcttcaagctcttcaacatccaggtcaaggaggtcgcgcagaatgaaggcaccaagaccatcgccaataacctcaccagcaccatccaggtgtttacggactcggagtaccagctgccgtacgttctcggctctgcccaccagggctgcctgcctccgttcccggcggacgtgttcacgattccccagtacggctacctaacactcaacaacggtagtcaggccgtgggacgctcctccttctactgcctggaatactttccttcgcagatgctgagaaccggcaacaacttccagtttacttacaccttcgaggacgtgcctttccacagcagctacgcccacagccagagcttggaccggctgatgaatcctctgattgaccagtacctgtactacttgtctcggattcaaacaacaggaggcacggcaaatacgcagactctgggcttcagccaaggtgggcctaatacaatggccaatcaggcaaagaactggctgccaggaccctgttaccgccaacaacgcgtctcaacgacaaccgggcaaaacaacaatagcaactttgcctggactgctgggaccaaataccatctgaatggaagaaattcattggctaatcctggcatcgctatggcaacacacaaagacgacgaggagcgtttttttcccagtaacgggatcctgatttttggcaaacaaaatgctgccagagacaatgcggattacagcgatgtcatgcccaccagcgaggaagaaatcaaaaccactaaccctgtggccacagaggaatacggtatcgtggcagataacttgcagcagcaaaacacggctcctcaaattggaactgtcaacagccagggggccttacccggtatggtctggcagaaccgggacgtgtacctgcagggtcccatctgggccaagattcctcacacggacggcaacttccacccgtctccgctgatgggcggctttggcctgaaacatcctccgcctcagatcctgatcaagaacacgcctgtacctgcggatcctccgaccaccttcaaccagtcaaagctgaactctttcatcacgcaatacagcaccggacaggtcagcgtggaaattgaatgggagctgcagaaggaaaacagcaagcgctggaaccccgagatccagtacacctccaactactacaaatctacaagtgtggactttgctgttaatacagaaggcgtgtactctgaaccccgccccattggcacccgttacctcacccgtaatctgtaa

SEQ ID NO: 3935 - DNA, 2217 bp, Artificial Sequence
  Description of Artificial Sequence: Synthetic polynucleotide
atggctgccgatggttatcttccagattggctcgaggacaacctctctgagggcattcgcgagtggtgggcgctgaaacctggagccccgaagcccaaagccaaccagcaaaagcaggacgacggccggggtctggtgcttcctggctacaagtacctcggacccttcaacggactcgacaagggggagcccgtcaacgcggcggacgcggcggccctcgagcacgacaaggcctacgaccagcagctgcaggcgggtgacaatccgtacctgcggtataaccacgccgacgccgagtttcaggagcgtctgcaagaagatacgtcttttgggggcaacctcgggcgagcagtcttccaggccaagaagcgggttctcgaacctctcggtctggttgaggaaggcgctaagacggctcctggaaagaagagaccggtagagccatcaccccagcgttctccagactcctctacgggcatcggcaagaagggccaacagcccgccagaaaaagactcaattttggtcagactggcgactcagagtcagttccagaccctcaacctctcggagaacctccagcagcgccctctggtgtgggacctaatacaatggctgcaggcggtggcgcaccaatggcagacaataacgaaggcgccgacggagtgggtagttcctcgggaaattggcattgcgattccacatggctgggcgacagagtcatcaccaccagcacccgaacctgggccctgcccacctacaacaaccacctctacaagcaaatctccaacgggacatcgggaggagccaccaacgacaacacctacttcggctacagcaccccctgggggtattttgactttaacagattccactgccacttttcaccacgtgactggcagcgactcatcaacaacaactggggattccggcccaagagactcagcttcaagctcttcaacatccaggtcaaggaggtcacgcagaatgaaggcaccaagaccatcgccaataacctcaccagcaccatccaggtgtttacggactcggagtaccagctgccgtacgttctcggctctgcccaccagggctgcctgcctccgttcccggcggacgtgttcacgattccccagtacggctacctaacactcaacaacggtagtcaggccgtgggacgctcctccttctactgcctggaatactttccttcgcagatgctgagaaccggcaacaacttccagtttacttacaccttcgaggacgtgcctttccacagcagctacgcccacagccagagcttggaccggctgatgaatcctctgattgaccagtacctgtactacttgtctcggattcaaacaacaggaggcacggcaaatacgcagactctgggcttcagccaaggtgggcctaatacaatggccaatcaggcaaagaactggctgccaggaccctgttaccgccaacaacgcgtctcaacgacaaccgggcaaaacaacaatagcaactttgcctggactgctgggaccaaataccatctgaatggaagaaattcattggctaatcctggcatcgctatggcaacacacaaagacgacgaggagcgtttttttcccagtaacgggatcctgatttttggcaaacaaaatgctgccagagacaatgcggattacagcgatgtcatgcccaccagcgaggaagaaatcaaaaccactaaccctgtggccacagaggaatacggtatcgtggcagataacttgcagcagcaaaacacggctcctcaaattggaactgtcaacagccagggggccttacccggtatggtctggcagaaccgggacgtgtacctgcagggtcccatctgggccaagattcctcacacggacggcaacttccacccgtctccgctgatgggcggctttggcctgaaacatcctccgcctcagatcctgatcaagaacacgcctgtacctgcggatcctccgaccaccttcaaccagtcaaagctgaactctttcatcacgcaatacagcaccggacaggtcagcgcggaaattgaatgggagctgcagaaggaaaacagcaagcgctggaaccccgagatccagtacacctccaactactacaaatctacaagtgtggactttgctgttaatacagaaggcgtgtactctgaaccccgccccattggcacccgttacctcacccgtaatctgtaa

SEQ ID NO: 3936 - DNA, 2217 bp, Artificial Sequence
  Description of Artificial Sequence: Synthetic polynucleotide
atggctgccgatggttatcttccagattggctcgaggacaacctctctgagggcattcgcgagtggtgggcgctgaaacctggagccccgaagcccaaagccaaccagcaaaagcaggacgacggccggggtctggtgcttcctggctacaagtacctcggacccttcaacggactcgacaagggggagcccgtcaacgcggcggacgcggcggccctcgagcacgacaaggcctacgaccagcagctgcaggcgggtgacaatccgtacctgcggtataaccacgccgacgccgagtttcaggagcgtctgcaagaagatacgtcttttgggggcaacctcgggcgagcagtcttccaggccaagaagcgggttctcgaacctctcggtctggttgaggaaggcgctaagacggctcctggaaagaagagaccggtagagccatcaccccagcgttctccagactcctctacgggcatcggcaagaagggccaacagcccgccagaaaaagactcaattttggtcagactggcgactcagagtcagttccagaccctcaacctctcggagaacctccagcagcgccctctggtgtgggacctaatacaatggctgcaggcggtggcgcaccaatggcagacaataacgaaggcgccgacggagtgggtagttcctcgggaaattggcattgcgattccacatggctgggcgacagagtcatcaccaccagcacccgaacctgggccctgcccacctacaacaaccacctctacaagcaaatctccaacgggacatcgggaggagccaccaacgacaacacctacttcggctacagcaccccctgggggtattttgactttaacagattccactgccacttttcaccacgtgactggcagcgactcatcaacaacaactggggattccggcccaagagactcagcttcaagctcttcaacatccaggtcaaggaggtcacgcagaatgaaggcaccaagaccatcgccaataacctcaccagcaccatccaggtgtttacggactcggagtaccagctgccgtacgttctcggctctgcccaccagggctgcctgcctccgttcccggcggacgtgttcacgattccccagtacggctacctaacactcaacaacggtagtcaggccgtgggacgctcctccttctactgcctggaatactttccttcgcagatgctgagaaccggcaacaacttccagtttacttacaccttcgaggacgtgcctttccacagcagctacgcccacagccagggcttggaccggctgatgaatcctctgattgaccagtacctgtactacttgtctcggattcaaacaacaggaggcacggcaaatacgcagactctgggcttcagccaaggtgggcctaatacaatggccaatcaggcaaagaactggctgccaggaccctgttaccgccaacaacgcgtctcaacgacaaccgggcaaaacaacaatagcaactttgcctggactgctgggaccaaataccatctgaatggaagaaattcattggctaatcctggcatcgctatggcaacacacaaagacgacgaggagcgtttttttcccagtaacgggatcctgatttttggcaaacaaaatgctgccagagacaatgcggattacagcgatgtcatgcccaccagcgaggaagaaatcaaaaccactaaccctgtggccacagaggaatacggtatcgtggcagataacttgcagcagcaaaacacggctcctcaaattggaactgtcaacagccagggggccttacccggtatggtctggcagaaccgggacgtgtacctgcagggtcccatctgggccaagattcctcacacggacggcaacttccacccgtctccgctgatgggcggctttggcctgaaacatcctccgcctcagatcctgatcaagaacacgcctgtacctgcggatcctccgaccaccttcaaccagtcaaagctgaactctttcatcacgcaatacagcaccggacaggtcagcgtggaaattgaatgggagctgcagaaggaaaacagcaagcgctggaaccccgagatccagtacacctccaactactacaaatctacaagtgtggactttgctgttaatacagaaggcgtgtactctgaaccccgccccattggcacccgttacctcacccgtaatctgtaa

SEQ ID NO: 3937 - DNA, 2217 bp, Artificial Sequence
  Description of Artificial Sequence: Synthetic polynucleotide
atggctgccgatggttatcttccagattggctcgaggacaacctctctgagggcattcgcgagtggtgggcgctgaaacctggagccccgaagcccaaagccaaccagcaaaagcaggacgacggccggggtctggtgcttcctggctacaagtacctcggacccttcaacggactcgacaagggggagcccgtcaacgcggcggacgcggcggccctcgagcacgacaaggcctacgaccagcagctgcaggcgggtgacaatccgtacctgcggtataaccacgccgacgccgagtttcaggagcgtctgcaagaagatacgtcttttgggggcaacctcgggcgagcagtcttccaggccaagaagcgggttctcgaacctctcggtctggttgaggaaggcgctaagacggctcctggaaagaagagaccggtagagccatcaccccagcgttctccagactcctctacgggcatcggcaagaagggccaacagcccgccagaaaaagactcaattttggtcagactggcgactcagagtcagttccagaccctcaacctctcggagaacctccagcagcgccctctggtgtgggacctaatacaatggctgcaggcggtggcgcaccaatggcagacaataacgaaggcgccgacggagtgggtagttcctcgggaaattggcattgcgattccacatggctgggcgacagagtcatcaccaccagcacccgaacctgggccctgcccacctacaacaaccacctctacaagcaaatctccaacgggacatcgggaggagccaccaacgacaacacctacttcggctacagcaccccctgggggtattttgactttaacagattccactgccacttttcaccacgtgactggcagcgactcatcaacaacaactggggattccggcccaagagactcagcttcaagctcttcaacatccaggtcaaggaggtcacgcagaatgaaggcaccaagaccatcgccaataacctcaccagcaccatccaggtgtttacggactcggagtaccagctgccgtacgttctcggctctgcccaccagggctgcctgcctccgttcccggcggacgtgttcacgattccccagtacggctacctaacactcaacaacggtagtcaggccgtgggacgctcctccttctactgcctggaatactttccttcgcagatgctgagaaccggcagcaacttccagtttacttacaccttcgaggacgtgcctttccacagcagctacgcccacagccagagcttggaccggctgatgaatcctctgattgaccagtacctgtactacttgtctcggattcaaacaacaggaggcacggcaaatacgcagactctgggcttcagccaaggtgggcctaatacaatggccaatcaggcaaagaactggctgccaggaccctgttaccgccaacaacgcgtctcaacgacaaccgggcaaaacaacaatagcaactttgcctggactgctgggaccaaataccatctgaatggaagaaattcattggctaatcctggcatcgctatggcaacacacaaagacgacgaggagcgtttttttcccagtaacgggatcctgatttttggcaaacaaaatgctgccagagacaatgcggattacagcgatgtcatgcccaccagcgaggaagaaatcaaaaccactaaccctgtggccacagaggaatacggtatcgtggcagataacttgcagcagcaaaacacggctcctcaaattggaactgtcaacagccagggggccttacccggtatggtctggcagaaccgggacgtgtacctgcagggtcccatctgggccaagattcctcacacggacggcaacttccacccgtctccgctgatgggcggctttggcctgaaacatcctccgcctcagatcctgatcaagaacacgcctgtacctgcggatcctccgaccaccttcaaccagtcaaagctgaactctttcatcacgcaatacagcaccggacaggtcagcgtggaaattgaatgggagctgcagaaggaaaacagcaagcgctggaaccccgagatccagtacacctccaactactacaaatctacaagtgtggactttgctgttaatacagaaggcgtgtactctgaaccccgccccattggcacccgttacctcacccgtaatctgtaa

SEQ ID NO: 3938 - DNA, 2217 bp, Artificial Sequence
  Description of Artificial Sequence: Synthetic polynucleotide
atggctgccgatggttatcttccagattggctcgaggacaacctctctgagggcattcgcgagtggtgggcgctgaaacctggagccccgaagcccaaagccaaccagcaaaagcaggacgacggccggggtctggtgcttcctggctacaagtacctcggacccttcaacggactcgacaagggggagcccgtcaacgcggcggacgcggcggccctcgagcacgacaaggcctacgaccagcagctgcaggcgggtgacaatccgtacctgcggtataaccacgccgacgccgagtttcaggagcgtctgcaagaagatacgtcttttgggggcaacctcgggcgagcagtcttccaggccaagaagcgggttctcgaacctctcggtctggttgaggaaggcgctaagacggctcctggaaagaagagaccggtagagccatcaccccagcgttctccagactcctctacgggcatcggcaagaagggccaacagcccgccagaaaaagactcaattttggtcagactggcgactcagagtcagttccagaccctcaacctctcggagaacctccagcagcgccctctggtgtgggacctaatacaatggctgcaggcggtggcgcaccaatggcagacaataacgaaggcgccgacggagtgggtagttcctcgggaaattggcattgcgattccacatggctgggcgacagagtcatcaccaccagcacccgaacctgggccctgcccacctacaacaaccacctctacaagcaaatctccaacgggacatcgggaggagccaccaacgacaacacctacttcggctacagcaccccctgggggtattttgactttaacagattccactgccacttttcaccacgtgactggcagcgactcatcaacaacaactggggattccggcccaagagactcagcttcaagctcttcaacatccaggtcaaggaggtcacgcagaatgaaggcaccaagaccatcgccaataacctcaccagcaccatccaggtgtttacggactcggagtaccagctgccgtacgttctcggctctgcccaccagggctgcctgcctccgttcccggcggacgtgttcacgattccccagtacggctacctaacactcaacaacggtagtcaggccgtgggacgctcctccttctactgcctggaatactttccttcgcagatgctgagaaccggcaacaacttccagtttacttacaccttcgaggacgtgcctttccacagcagctacgcccacagccagagcttggaccggctgatgaatcctctgattgaccagtacctgtactacttgtctcggattcaaacaacaggaggcacggcaaatacgcagactctgggcttcagccaaggtgggcctaatacaatggccaatcaggcaaagaactggctgccaggaccctgttaccgccaacaacgcgtctcaacgacaaccgggcaaaacaacaatagcaactttgcctggactgctgggaccaaataccatctgaatggaagaaattcattggctaatcctggcatcgctatggcaacacacaaagacgacgaggagcgtttttttcccagtaacgggatcctgatttttggcaaacaaaatgctgccagagacaatgcggattacagcgatgtcatgcccaccagcgaggaagaaatcaaaaccactaaccctgtggccacagaggaatacggtatcgtggcagataacttgcagcagcaaaacacggctcctcaaattggaactgtcaacagccagggggccttacccggtatggtctggcagaaccgggacgtgtacctgcagggtcccatctgggccaagattcctcacacggacggcaacttccacccgtctccgctgatgggcggctttggcctgaaacatcctccgcctcagatcctgatcaagaacacgcctgtacctgcggatcctccgaccaccttcaaccagtcaaagctgaactctttcatcacgcaatacagcaccggacaggtcagcgtggaaattgaatgggagctgcggaaggaaaacagcaagcgctggaaccccgagatccagtacacctccaactactacaaatctacaagtgtggactttgctgttaatacagaaggcgtgtactctgaaccccgccccattggcacccgttacctcacccgtaatctgtaa

SEQ ID NO: 3939 - DNA, 2217 bp, Artificial Sequence
  Description of Artificial Sequence: Synthetic polynucleotide
atggctgccgatggttatcttccagattggctcgaggacaacctctctgagggcattcgcgagtggtgggcgctgaaacctggagccccgaagcccaaagccaaccagcaaaagcaggacgacggccggggtctggtgcttcctggctacaagtacctcggacccttcaacggactcgacaagggggagcccgtcaacgcggcggacgcggcggccctcgagcacgacaaggcctacgaccagcagctgcaggcgggtgacaatccgtacctgcggtataaccacgccgacgccgagtttcaggagcgtctgcaagaagatacgtcttttgggggcaacctcgggcgagcagtcttccaggccaagaagcgggttctcgaacctctcggtctggttgaggaaggcgctaagacggctcctggaaagaagagaccggtagagccatcaccccagcgttctccagactcctctacgggcatcggcaagaagggccaacagcccgccagaaaaagactcaattttggtcagactggcgactcagagtcagttccagaccctcaacctctcggagaacctccagcagcgccctctggtgtgggacctaatacaatggctgcaggcggtggcgcaccaatggcagacaataacgaaggcgccgacggagtgggtagttcctcgggaaattggcattgcgattccacatggctgggcgacagagtcatcaccaccagcacccgaacctgggccctgcccacctacaacaaccacctctacaagcaaatctccaacgggacatcgggaggagccaccaacgacaacacctacttcggctacagcaccccctgggggtattttgactttaacagattccactgccacttttcaccacgtgactggcagcgactcatcaacaacaactggggattccggcccaagagactcagcttcaagctcttcaacatccaggtcaaggaggtcacgcagaatgaaggcaccaagaccatcgccaataacctcaccagcaccatccaggtgtttacggactcggagtaccagctgccgtacgttctcggctctgcccaccagggctgcctgcctccgttcccggcggacgtgttcacgattccccagtacggctacctaacactcaacaacggtagtcaggccgtgggacgctcctccttctactgcctggaatactttccttcgcagatgctgagaaccggcaacaacttccagtttacttacaccttcgaggacgcgcctttccacagcagctacgcccacagccagagcttggaccggctgatgaatcctctgattgaccagtacctgtactacttgtctcggattcaaacaacaggaggcacggcaaatacgcagactctgggcttcagccaaggtgggcctaatacaatggccaatcaggcaaagaactggctgccaggaccctgttaccgccaacaacgcgtctcaacgacaaccgggcaaaacaacaatagcaactttgcctggactgctgggaccaaataccatctgaatggaagaaattcattggctaatcctggcatcgctatggcaacacacaaagacgacgaggagcgtttttttcccagtaacgggatcctgatttttggcaaacaaaatgctgccagagacaatgcggattacagcgatgtcatgcccaccagcgaggaagaaatcaaaaccactaaccctgtggccacagaggaatacggtatcgtggcagataacttgcagcagcaaaacacggctcctcaaattggaactgtcaacagccagggggccttacccggtatggtctggcagaaccgggacgtgtacctgcagggtcccatctgggccaagattcctcacacggacggcaacttccacccgtctccgctgatgggcggctttggcctgaaacatcctccgcctcagatcctgatcaagaacacgcctgtacctgcggatcctccgaccaccttcaaccagtcaaagctgaactctttcatcacgcaatacagcaccggacaggtcagcgtggaaattgaatgggagctgcagaaggaaaacagcaagcgctggaaccccgagatccagtacacctccaactactacaaatctacaagtgtggactttgctgttaatacagaaggcgtgtactctgaaccccgccccattggcacccgttacctcacccgtaatctgtaa

SEQ ID NO: 3940 - DNA, 2217 bp, Artificial Sequence
  Description of Artificial Sequence: Synthetic polynucleotide
atggctgccgatggttatcttccagattggctcgaggacaacctctctgagggcattcgcgagtggtgggcgctgaaacctggagccccgaagcccaaagccaaccagcaaaagcaggacgacggccggggtctggtgcttcctggctacaagtacctcggacccttcaacggactcgacaagggggagcccgtcaacgcggcggacgcggcggccctcgagcacgacaaggcctacgaccagcagctgcaggcgggtgacaatccgtacctgcggtataaccacgccgacgccgagtttcaggagcgtctgcaagaagatacgtcttttgggggcaacctcgggcgagcagtcttccaggccaagaagcgggttctcgaacctctcggtctggttgaggaaggcgctaagacggctcctggaaagaagagaccggtagagccatcaccccagcgttctccagactcctctacgggcatcggcaagaagggccaacagcccgccagaaaaagactcaattttggtcagactggcgactcagagtcagttccagaccctcaacctctcggagaacctccagcagcgccctctggtgtgggacctaatacaatggctgcaggcggtggcgcaccaatggcagacaataacgaaggcgccgacggagtgggtagttcctcgggaaattggcattgcgattccacatggctgggcgacagagtcatcaccgccagcacccgaacctgggccctgcccacctacaacaaccacctctacaagcaaatctccaacgggacatcgggaggagccaccaacgacaacacctacttcggctacagcaccccctgggggtattttgactttaacagattccactgccacttttcaccacgtgactggcagcgactcatcaacaacaactggggattccggcccaagagactcagcttcaagctcttcaacatccaggtcaaggaggtcacgcagaatgaaggcaccaagaccatcgccaataacctcaccagcaccatccaggtgtttacggactcggagtaccagctgccgtacgttctcggctctgcccaccagggctgcctgcctccgttcccggcggacgtgttcacgattccccagtacggctacctaacactcaacaacggtagtcaggccgtgggacgctcctccttctactgcctggaatactttccttcgcagatgctgagaaccggcaacaacttccagtttacttacaccttcgaggacgtgcctttccacagcagctacgcccacagccagagcttggaccggctgatgaatcctctgattgaccagtacctgtactacttgtctcggattcaaacaacaggaggcacggcaaatacgcagactctgggcttcagccaaggtgggcctaatacaatggccaatcaggcaaagaactggctgccaggaccctgttaccgccaacaacgcgtctcaacgacaaccgggcaaaacaacaatagcaactttgcctggactgctgggaccaaataccatctgaatggaagaaattcattggctaatcctggcatcgctatggcaacacacaaagacgacgaggagcgtttttttcccagtaacgggatcctgatttttggcaaacaaaatgctgccagagacaatgcggattacagcgatgtcatgcccaccagcgaggaagaaatcaaaaccactaaccctgtggccacagaggaatacggtatcgtggcagataacttgcagcagcaaaacacggctcctcaaattggaactgtcaacagccagggggccttacccggtatggtctggcagaaccgggacgtgtacctgcagggtcccatctgggccaagattcctcacacggacggcaacttccacccgtctccgctgatgggcggctttggcctgaaacatcctccgcctcagatcctgatcaagaacacgcctgtacctgcggatcctccgaccaccttcaaccagtcaaagctgaactctttcatcacgcaatacagcaccggacaggtcagcgtggaaattgaatgggagctgcagaaggaaaacagcaagcgctggaaccccgagatccagtacacctccaactactacaaatctacaagtgtggactttgctgttaatacagaaggcgtgtactctgaaccccgccccattggcacccgttacctcacccgtaatctgtaa

SEQ ID NO: 3941 - DNA, 2217 bp, Artificial Sequence
  Description of Artificial Sequence: Synthetic polynucleotide
atggctgccgatggttatcttccagattggctcgaggacaacctctctgagggcattcgcgagtggtgggcgctgaaacctggagccccgaagcccaaagccaaccagcaaaagcaggacgacggccggggtctggtgcttcctggctacaagtacctcggacccttcaacggactcgacaagggggagcccgtcaacgcggcggacgcggcggccctcgagcacgacaaggcctacgaccagcagctgcaggcgggtgacaatccgtacctgcggtataaccacgccgacgccgagtttcaggagcgtctgcaagaagatacgtcttttgggggcaacctcgggcgagcagtcttccaggccaagaagcgggttctcgaacctctcggtctggttgaggaaggcgctaagacggctcctggaaagaagagaccggtagagccatcaccccagcgttctccagactcctctacgggcatcggcaagaagggccaacagcccgccagaaaaagactcaattttggtcagactggcgactcagagtcagttccagaccctcaacctctcggagaacctccagcagcgccctctggtgtgggacctaatacaatggctgcaggcggtggcgcaccaatggcagacaataacgaaggcgccgacggagtgggtagttcctcgggaaattggcattgcgattccacatggctgggcgacagagtcatcaccaccagcacccgaacctgggccctgcccacctacaacaaccacctctacaagcaaatctccaacgggacatcgggaggagccaccaacgacaacacctacttcggctacagcaccccctgggggtattttgactttaacagattccactgccacttttcaccacgtgactggcagcgactcatcaacaacaactggggattccggcccaagagactcagcttcaagctcttcaacatccaggtcaaggaggtcacgcagaatgaaggcaccaagaccatcgccaataacctcaccagcaccatccaggtgtttacggactcggagtaccagctgccgtacgttctcggctctgcccaccagggctgcctgcctccgttcccggcggacgtgttcacgattccccagtacggctacctaacactcaacaacggtagtcaggccgtgggacgctcctccttctactgcctggaatactttccttcgcagatgctgagaaccggcaacaacttccagtttacttacaccttcgaggacgtgcctttccacagcagctacgcccacagccagagcttggaccggctgatgaatcctctgattgaccagtacctgtactacttgtctcggattcaaacaacaggaggcacggcaaatacgcagactctgggcttcagccaaggtgggcctaatacaatggccaatcaggcaaagaactggctgccaggaccctgttaccgccaacaacgcgtctcaacgacaaccgggcaaaacaacaatagcaactttgcctggactgctgggaccaaataccatctgaatggaagaaattcattggctaatcctggcatcgctatggcaacacacaaagacgacgaggagcgtttttttcccagtaacgggatcctgatttttggcaaacaaaatgctgccagagacaatgcggattacagcgatgtcatgcccaccagcgaggaagaaatcaaaaccactaaccctgtggccacagaggaatacggtatcgtggcagataacttgcagcagcaaaacacggctcctcaaattggaactgtcaacagccagggggccttacccggtatggtctggcagaaccgggacgtgtacctgcagggtcccatctgggccaagattcctcacacggacggcaacttccacccgtctccgctgatgggcggctttggcctgaaacatcctccgcctcagatcctgatcaagaacacgcctgtacctgcggatcctccgaccaccttcaaccagtcaaagctgaactctttcatcacgcaatacagcaccggacaggtcagcgtggaaattgaatgggagctgcagaaggaaaacagcaagcgccggaaccccgagatccagtacacctccaactactacaaatctacaagtgtggactttgctgttaatacagaaggcgtgtactctgaaccccgccccattggcacccgttacctcacccgtaatctgtaa

SEQ ID NO: 3942 - DNA, 2217 bp, Artificial Sequence
  Description of Artificial Sequence: Synthetic polynucleotide
atggctgccgatggttatcttccagattggctcgaggacaacctctctgagggcattcgcgagtggtgggcgctgaaacctggagccccgaagcccaaagccaaccagcaaaagcaggacgacggccggggtctggtgcttcctggctacaagtacctcggacccttcaacggactcgacaagggggagcccgtcaacgcggcggacgcggcggccctcgagcacgacaaggcctacgaccagcagctgcaggcgggtgacaatccgtacctgcggtataaccacgccgacgccgagtttcaggagcgtctgcaagaagatacgtcttttgggggcaacctcgggcgagcagtcttccaggccaagaagcgggttctcgaacctctcggtctggttgaggaaggcgctaagacggctcctggaaagaagagaccggtagagccatcaccccagcgttctccagactcctctacgggcatcggcaagaagggccaacagcccgccagaaaaagactcaattttggtcagactggcgactcagagccagttccagaccctcaacctctcggagaacctccagcagcgccctctggtgtgggacctaatacaatggctgcaggcggtggcgcaccaatggcagacaataacgaaggcgccgacggagtgggtagttcctcgggaaattggcattgcgattccacatggctgggcgacagagtcatcaccaccagcacccgaacctgggccctgcccacctacaacaaccacctctacaagcaaatctccaacgggacatcgggaggagccaccaacgacaacacctacttcggctacagcaccccctgggggtattttgactttaacagattccactgccacttttcaccacgtgactggcagcgactcatcaacaacaactggggattccggcccaagagactcagcttcaagctcttcaacatccaggtcaaggaggtcacgcagaatgaaggcaccaagaccatcgccaataacctcaccagcaccatccaggtgtttacggactcggagtaccagctgccgtacgttctcggctctgcccaccagggctgcctgcctccgttcccggcggacgtgttcacgattccccagtacggctacctaacactcaacaacggtagtcaggccgtgggacgctcctccttctactgcctggaatactttccttcgcagatgctgagaaccggcaacaacttccagtttacttacaccttcgaggacgtgcctttccacagcagctacgcccacagccagagcttggaccggctgatgaatcctctgattgaccagtacctgtactacttgtctcggattcaaacaacaggaggcacggcaaatacgcagactctgggcttcagccaaggtgggcctaatacaatggccaatcaggcaaagaactggctgccaggaccctgttaccgccaacaacgcgtctcaacgacaaccgggcaaaacaacaatagcaactttgcctggactgctgggaccaaataccatctgaatggaagaaattcattggctaatcctggcatcgctatggcaacacacaaagacgacgaggagcgtttttttcccagtaacgggatcctgatttttggcaaacaaaatgctgccagagacaatgcggattacagcgatgtcatgcccaccagcgaggaagaaatcaaaaccactaaccctgtggccacagaggaatacggtatcgtggcagataacttgcagcagcaaaacacggctcctcaaattggaactgtcaacagccagggggccttacccggtatggtctggcagaaccgggacgtgtacctgcagggtcccatctgggccaagattcctcacacggacggcaacttccacccgtctccgctgatgggcggctttggcctgaaacatcctccgcctcagatcctgatcaagaacacgcctgtacctgcggatcctccgaccaccttcaaccagtcaaagctgaactctttcatcacgcaatacagcaccggacaggtcagcgtggaaattgaatgggagctgcagaaggaaaacagcaagcgctggaaccccgagatccagtacacctccaactactacaaatctacaagtgtggactttgctgttaatacagaaggcgtgtactctgaaccccgccccattggcacccgttacctcacccgtaatctgtaa

SEQ ID NO: 3943 - DNA, 2217 bp, Artificial Sequence
  Description of Artificial Sequence: Synthetic polynucleotide
atggctgccgatggttatcttccagattggctcgaggacaacctctctgagggcattcgcgagtggtgggcgctgaaacctggagccccgaagcccaaagccaaccagcaaaagcaggacgacggccggggtctggtgcttcctggctacaagtacctcggacccttcaacggactcgacaagggggagcccgtcaacgcggcggacgcggcggccctcgagcacgacaaggcctacgaccagcagctgcaggcgggtgacaatccgtacctgcggtataaccacgccgacgccgagtttcaggagcgtctgcaagaagatacgtcttttgggggcaacctcgggcgagcagtcttccaggccaagaagcgggttctcgaacctctcggtctggttgaggaaggcgctaagacggctcctggaaagaagagaccggtagagccatcaccccagcgttctccagactcctctacgggcatcggcaagaagggccaacagcccgccagaaaaagactcaattttggtcagactggcgactcagagtcagttccagaccctcaacctctcggagaacctccagcagcgccctctggtgtgggacctaatacaatggctgcaggcggtggcgcaccaatggcagacaataacgaaggcgccgacggagtgggtagttcctcgggaaattggcattgcgattccacatggctgggcgacagagtcatcaccaccagcacccgaacctgggccctgcccacctacaacaaccacctctacaagcaaatctccaacgggacatcgggaggagccaccaacgacaacacctacttcggctacagcaccccctgggggtattttgactttaacagattccactgccacttttcaccacgtgactggcagcgactcatcaacaacaactggggattccggcccaagagactcagcttcaagctcttcaacatccaggtcaaggaggtcacgcagaatgaaggcaccaagaccatcgccaataacctcaccagcaccatccaggtgtttacggactcggagtaccagctgccgtacgttctcggctctgcccaccagggctgcctgcctccgttcccggcggacgtgttcacgattccccagtacggctacctaacactcaacaacggtagtcaggccgtgggacgctcctccttctactgcctggaatactttccttcgcagatgctgagaaccggcaacaacttccagtttacttacaccttcgaggacgtgcctttccacagcagctacgcccacagccagagcttggaccggctgatgaatcctctgattgaccagtacctgtactacttgtctcggattcaaacaacaggaggcacggcaaatacgcagactctgggcttcagccaaggtgggcctaatacaatggccaatcaggcaaagaactggctgccaggaccctgttaccgccaacaacgcgtctcaacgacaaccgggcaaaacaacaatagcaactttgcctggactgctgggaccaaataccatctgaatggaagaaattcattggctaatcctggcatcgctatggcaacacacaaagacgacgaggagcgtttttttcccagtaacgggatcccgatttttggcaaacaaaatgctgccagagacaatgcggattacagcgatgtcatgcccaccagcgaggaagaaatcaaaaccactaaccctgtggccacagaggaatacggtatcgtggcagataacttgcagcagcaaaacacggctcctcaaattggaactgtcaacagccagggggccttacccggtatggtctggcagaaccgggacgtgtacctgcagggtcccatctgggccaagattcctcacacggacggcaacttccacccgtctccgctgatgggcggctttggcctgaaacatcctccgcctcagatcctgatcaagaacacgcctgtacctgcggatcctccgaccaccttcaaccagtcaaagctgaactctttcatcacgcaatacagcaccggacaggtcagcgtggaaattgaatgggagctgcagaaggaaaacagcaagcgctggaaccccgagatccagtacacctccaactactacaaatctacaagtgtggactttgctgttaatacagaaggcgtgtactctgaaccccgccccattggcacccgttacctcacccgtaatctgtaa

SEQ ID NO: 3944 - DNA, 2217 bp, Artificial Sequence
  Description of Artificial Sequence: Synthetic polynucleotide
atggctgccgatggttatcttccagattggctcgaggacaacctctctgagggcattcgcgagtggtgggcgctgaaacctggagccccgaagcccaaagccaaccagcaaaagcaggacgacggccggggtctggtgcttcctggctacaagtacctcggacccttcaacggactcgacaagggggagcccgtcaacgcggcggacgcggcggccctcgagcacgacaaggcctacgaccagcagctgcaggcgggtgacaatccgtacctgcggtataaccacgccgacgccgagtttcaggagcgtctgcaagaagatacgtcttttgggggcaacctcgggcgagcagtcttccaggccaagaagcgggttctcgaacctctcggtctggttgaggaaggcgctaagacggctcctggaaagaagagaccggtagagccatcaccccagcgttctccagactcctctacgggcatcggcaagaagggccaacagcccgccagaaaaagactcaattttggtcagactggcgactcagagtcagttccagaccctcaacctctcggagaacctccagcagcgccctctggtgtgggacctaatacaatggctgcaggcggtggcgcaccaatggcagacaataacgaaggcgccgacggagtgggtagttcctcgggaaattggcattgcgattccacatggctgggcgacagagtcatcaccaccagcacccgaacctgggccctgcccacctacaacaaccacctctacaagcaaatctccaacgggacatcgggaggagccaccaacgacaacacctacttcggctacagcaccccctgggggtattttgactttaacagattccactgccacttttcaccacgtgactggcagcgactcatcaacaacaactggggattccggcccaagagactcagcttcaagctcttcaacatccaggtcaaggaggtcacgcagaatgaaggcaccaagaccatcgccaataacctcaccagcaccatccaggtgtttacggactcggagtaccagctgccgtacgttctcggctctgcccaccagggctgcctgcctccgttcccggcggacgtgttcacgattccccagtacggctacctaacactcaacaacggtagtcaggccgtgggacgctcctccttctactgcctggaatactttccttcgcagatgctgagaaccggcaacaacttccagtttacttacaccttcgaggacgtgcctttccacagcagctacgcccacagccagagcttggaccggctgatgaatcctctgattgaccagtacctgtactacttgtctcggattcaaacaacaggaggcacggcaaatacgcagactctgggcttcagccaaggtgggcctaatacaatggccaatcaggcaaagaactggctgccaggaccctgttaccgccaacaacgcgtctcaacgacaaccgggcaaaacaacaatagcaactttgcctggactgctgggaccaaataccatctgaatggaagaaattcattggctaatcctggcatcgctatggcaacacacaaagacgacgaggagcgtttttttcccagtaacgggatcctgatttttggcaaacaaaatgctgccagagacaatgcggattacagcgatgtcatgcccaccagcgaggaagaaatcaaaaccactaaccctgtggccacagaggaatacggtatcgtggcagataacttgcagcagcaaaacacggctcctcaaattggaactgtcaacagccagggggccttacccggtatggtctggcagaaccgggacgtgtacctgcagggtcccatctgggccaagattcctcacacggacggcaacttccacccgtctccgctgatgggcggctttggcctgaaacatcctccgcctcagatcctgatcaagaacacgcctgtacctgcggatcctccgaccaccttcaaccagtcaaagctgaactctttcatcacgcaatacagcaccggacaggtcagcgtggaaattgaatgggagctgcagaaggaaaacagcaagcgctggaaccccgagatccagcacacctccaactactacaaatctacaagtgtggactttgctgttaatacagaaggcgtgtactctgaaccccgccccattggcacccgttacctcacccgtaatctgtaa

SEQ ID NO: 3945 - DNA, 2217 bp, Artificial Sequence
  Description of Artificial Sequence: Synthetic polynucleotide
atggctgccgatggttatcttccagattggctcgaggacaacctctctgagggcattcgcgagtggtgggcgctgaaacctggagccccgaagcccaaagccaaccagcaaaagcaggacgacggccggggtctggtgcttcctggctacaagtacctcggacccttcaacggactcgacaagggggagcccgtcaacgcggcggacgcggcggccctcgagcacgacaaggcctacgaccagcagctgcaggcgggtgacaatccgtacctgcggtataaccacgccgacgccgagtttcaggagcgtctgcaagaagatacgtcttttgggggcaacctcgggcgagcagtcttccaggccaagaagcgggttctcgaacctctcggtctggttgaggaaggcgctaagacggctcctggaaagaagagaccggtagagccatcaccccagcgttctccagactcctctacgggcatcggcaagaagggccaacagcccgccagaaaaagactcaattttggtcagactggcgactcagagtcagttccagaccctcaacctctcggagaacctccagcagcgccctctggtgtgggacctaatacaatggctgcaggcggtggcgcaccaatggcagacaataacgaaggcgccgacggagtgggtagttcctcgggaaattggcattgcgattccacatggctgggcgacagagtcatcaccaccagcacccgaacctgggccctgcccacctacaacaaccacctctacaagcaaatctccaacgggacatcgggaggagccaccaacgacaacacctacttcggctacagcaccccctgggggtattttgactttaacagattccactgccacttttcaccacgtgactggcagcgactcatcaacaacaactggggattccggcccaagagactcagcttcaagctcttcaacatccaggtcaaggaggtcacgcagaatgaaggcaccaagaccatcgccaataacctcaccagcaccatccaggtgtttacggactcggagtaccagctgccgtacgttctcggctctgcccaccagggctgcctgcctccgttcccggcggacgtgttcacgattccccagtacggctacctaacactcaacaacggtagtcaggccgtgggacgctcctccttctactgcctggaatactttccttcgcagatgctgagaaccggcaacaacttccagtttacttacaccttcgaggacgtgcctttccacagcagctacgcccacagccagagcttggaccggctgatgaatcctctgattgaccagtacctgtactacttgtctcggattcaaacaacaggaggcacggcaaatacgcagactctgggcttcagccaaggtgggcctaatacaatggccaatcaggcaaagaactggctgccaggaccctgttaccgccaacaacgcgtctcaacgacaaccgggcaaaacaacaatagcaactttgcctggactgctgggaccaaataccatctgaatggaagaaattcattggctaatcctggcatcgctatggcaacacacaaagacgacgaggagcgtttttttcccagtaacgggatcctgatttttggcaaacaaaatgctgccagagacaatgcggattacagcgatgtcatgcccaccagcgaggaagaaatcaaaaccactaaccctgtggccacagaggaatacggtatcgtggcagataacttgcagcagcaaaacacggctcctcaaattggaactgtcaacagccagggggccttacccggtatggtctggcagaaccgggacgtgtacctgcagggtcccatctgggccaagattcctcacacggacggcaacttccacccgtctccgctgatgggcggctttggcctgaaacatcctccgcctcagatcctgatcaagaacacgcctgtacctgcggatcctccgaccaccttcaaccagtcaaagctgaaccctttcatcacgcaatacagcaccggacaggtcagcgtggaaattgaatgggagctgcagaaggaaaacagcaagcgctggaaccccgagatccagtacacctccaactactacaaatctacaagtgtggactttgctgttaatacagaaggcgtgtactctgaaccccgccccattggcacccgttacctcacccgtaatctgtaa

SEQ ID NO: 3946 - DNA, 2217 bp, Artificial Sequence
  Description of Artificial Sequence: Synthetic polynucleotide
atggctgccgatggttatcttccagattggctcgaggacaacctctctgagggcattcgcgagtggtgggcgctgaaacctggagccccgaagcccaaagccaaccagcaaaagcaggacgacggccggggtctggtgcttcctggctacaagtacctcggacccttcaacggactcgacaagggggagcccgtcaacgcggcggacgcggcggccctcgagcacgacaaggcctacgaccagcagctgcaggcgggtgacaatccgtacctgcggtataaccacgccgacgccgagtttcaggagcgtctgcaagaagatacgtcttttgggggcaacctcgggcgagcagtcttccaggccaagaagcgggttctcgaacctctcggtctggttgaggaaggcgctaagacggctcctggaaagaagagaccggtagagccatcaccccagcgttctccagactcctctacgggcatcggcaagaagggccaacagcccgccagaaaaagactcaattttggtcagactggcgactcagagtcagttccagaccctcaacctctcggagaacctccagcagcgccctctggtgtgggacctaatacaatggctgcaggcggtggcgcaccaatggcagacaataacgaaggcgccgacggagtgggtagttcctcgggaaattggcattgcgattccacatggctgggcgacagagtcatcaccaccagcacccgaacctgggccctgcccacctacaacaaccacctctacaagcaaatctccaacgggacatcgggaggagccaccaacgacaacacctacttcggctacagcaccccctgggggtattttgactttaacagattccactgccacttttcaccacgtgactggcagcgactcatcaacaacaactggggattccggcccaagagactcagcttcaagctcttcaacatccaggtcaaggaggtcacgcagaatgaaggcaccaagaccatcgccaataacctcaccagcaccatccaggtgtttacggactcggagtaccagctgccgtacgttctcggctctgcccaccagggctgcctgcctccgttcccggcggacgtgttcacgattccccagtacggctacctaacactcaacaacggtagtcaggccgtgggacgctcctccttctactgcctggaatactttccttcgcagatgctgagaaccggcaacaacttccagtttacttacaccttcgaggacgtgcctttccacagcagctacgcccacagccagagcttggaccggctgatgaatcctctgattgaccagtacctgtactacttgtctcggattcaaacaacaggaggcacggcaaatacgcagactctgggcttcagccaaggtgggcctaatacaatggccaatcaggcaaagaactggctgccaggaccctgttaccgccaacaacgcgtctcaacgacaaccgggcaaaacaacaatagcaactttgcctggactgctgggaccaaataccatctgaatggaagaaattcattggctaatcctggcatcgctatggcaacacacaaagacgacgaggagcgtttttttcccagtaacgggatcctgatttttggcaaacaaaatgctgccagagacaatgcggattacagcgatgtcatgcccaccagcgaggaagaaatcaaaaccactaaccctgtggccacagaggaatacggtatcgtggcagataacttgcagcagcaaaacacggctcctcaaattggaactgtcaacagccagggggccttacccggtatggtctggcagaaccgggacgtgtacctgcagggtcccatctgggccaagattcctcacacggacggcaacttccgcccgtctccgctgatgggcggctttggcctgaaacatcctccgcctcagatcctgatcaagaacacgcctgtacctgcggatcctccgaccaccttcaaccagtcaaagctgaactctttcatcacgcaatacagcaccggacaggtcagcgtggaaattgaatgggagctgcagaaggaaaacagcaagcgctggaaccccgagatccagtacacctccaactactacaaatctacaagtgtggactttgctgttaatacagaaggcgtgtactctgaaccccgccccattggcacccgttacctcacccgtaatctgtaa

SEQ ID NO: 3947 - DNA, 2217 bp, Artificial Sequence
  Description of Artificial Sequence: Synthetic polynucleotide
atggctgccgatggttatcttccagattggctcgaggacaacctctctgagggcattcgcgagtggtgggcgctgaaacctggagccccgaagcccaaagccaaccagcaaaagcaggacgacggccggggtctggtgcttcctggctacaagtacctcggacccttcaacggactcgacaagggggagcccgtcaacgcggcggacgcggcggccctcgagcacgacaaggcctacgaccagcagctgcaggcgggtgacaatccgtacctgcggtataaccacgccgacgccgagtttcaggagcgtctgcaagaagatacgtcttttgggggcaacctcgggcgagcagtcttccaggccaagaagcgggttctcgaacctctcggtctggttgaggaaggcgctaagacggctcctggaaagaagagaccggtagagccatcaccccagcgttctccagactcctctacgggcatcggcaagaagggccaacagcccgccagaaaaagactcaattttggtcagactggcgactcagagtcagttccagaccctcaacctctcggagaacctccagcagcgccctctggtgtgggacctaatacaatggctgcaggcggtggcgcaccaatggcagacaataacgaaggcgccgacggagtgggtagttcctcgggaaattggcattgcgattccacatggctgggcgacagagtcatcaccaccagcacccgaacctgggccctgcccacctacaacaaccacctctacaagcaaatctccaacgggacatcgggaggagccaccaacgacaacacctacttcggctacagcaccccctgggggtattttgactttaacagattccactgccacttttcaccacgtgactggcagcgactcatcaacaacaactggggattccggcccaagagactcagcttcaagctcttcaacatccaggtcaaggaggtcacgcagaatgaaggcaccaagaccatcgccaataacctcaccagcaccatccaggtgtttacggactcggagtaccagctgccgtacgttctcggctctgcccaccagggctgcctgcctccgttcccggcggacgtgttcacgattccccagtacggctacctaacactcaacaacggtagtcaggccgtgggacgctcctccttctactgcctggaatactttccttcgcagatgctgagaaccggcaacaacttccagtttacttacaccttcgaggacgtgcctttccacagcagctacgcccacagccagagcttggaccggctgatgaatcctctgattgaccagtacctgtactacttgtctcggattcaaacaacaggaggcacggcaaatacgcagactctgggcttcagccaaggtgggcctaatacaatggccaatcaggcaaagaactggctgccaggaccctgttaccgccaacaacgcgtctcaacgacaaccgggcaaaacaacaatagcaactttgcctggactgctgggaccaaataccatctgaatggaagaaattcattggctaatcctggcatcgctatggcaacacacaaagacgacgaggagcgtttttttcccagtaacgggatcctgatttttggcaaacaaaatgctgccagagacaatgcggattacagcgatgtcatgcccaccagcgaggaagaaatcaaaaccactaaccctgtggccacagaggaatacggtatcgtggcagataacttgcagcagcaaaacacggctcctcaaattggaactgtcaacagccagggggccttacccggtatggtctggcagaaccgggacgtgtacctgcagggtcccatctgggccaagattcctcacacggacggcaacttccacccgtctccgctgatgggcggctttggcctgaaacatcctccgcctcagatcctgatcaagaacacgcctgtacctgcggatcctccgaccaccttcaaccagtcaaagctgaactctttcatcacgcaatacagcaccggacaggtcagcgtggaaattgaatgggagctgcagaaggaaaacagcaagcgctggaaccccgagatccagtacacctccaactactacaaatctacaagtgtggactttgctgttaatacagaaggcgtgtactctgaaccccgccccattggcgcccgttacctcacccgtaatctgtaa

SEQ ID NO: 3948 - DNA, 2217 bp, Artificial Sequence
  Description of Artificial Sequence: Synthetic polynucleotide
atggctgccgatggttatcttccagattggctcgaggacaacctctctgagggcattcgcgagtggtgggcgctgaaacctggagccccgaagcccaaagccaaccagcaaaagcaggacgacggccggggtctggtgcttcctggctacaagtacctcggacccttcaacggactcgacaagggggagtccgtcaacgcggcggacgcggcggccctcgagcacgacaaggcctacgaccagcagctgcaggcgggtgacaatccgtacctgcggtataaccacgccgacgccgagtttcaggagcgtctgcaagaagatacgtcttttgggggcaacctcgggcgagcagtcttccaggccaagaagcgggttctcgaacctctcggtctggttgaggaaggcgctaagacggctcctggaaagaagagaccggtagagccatcaccccagcgttctccagactcctctacgggcatcggcaagaagggccaacagcccgccagaaaaagactcaattttggtcagactggcgactcagagtcagttccagaccctcaacctctcggagaacctccagcagcgccctctggtgtgggacctaatacaatggctgcaggcggtggcgcaccaatggcagacaataacgaaggcgccgacggagtgggtagttcctcgggaaattggcattgcgattccacatggctgggcgacagagtcatcaccaccagcacccgaacctgggccctgcccacctacaacaaccacctctacaagcaaatctccaacgggacatcgggaggagccaccaacgacaacacctacttcggctacagcaccccctgggggtattttgactttaacagattccactgccacttttcaccacgtgactggcagcgactcatcaacaacaactggggattccggcccaagagactcagcttcaagctcttcaacatccaggtcaaggaggtcacgcagaatgaaggcaccaagaccatcgccaataacctcaccagcaccatccaggtgtttacggactcggagtaccagctgccgtacgttctcggctctgcccaccagggctgcctgcctccgttcccggcggacgtgttcacgattccccagtacggctacctaacactcaacaacggtagtcaggccgtgggacgctcctccttctactgcctggaatactttccttcgcagatgctgagaaccggcaacaacttccagtttacttacaccttcgaggacgtgcctttccacagcagctacgcccacagccagagcttggaccggctgatgaatcctctgattgaccagtacctgtactacttgtctcggattcaaacaacaggaggcacggcaaatacgcagactctgggcttcagccaaggtgggcctaatacaatggccaatcaggcaaagaactggctgccaggaccctgttaccgccaacaacgcgtctcaacgacaaccgggcaaaacaacaatagcaactttgcctggactgctgggaccaaataccatctgaatggaagaaattcattggctaatcctggcatcgctatggcaacacacaaagacgacgaggagcgtttttttcccagtaacgggatcctgatttttggcaaacaaaatgctgccagagacaatgcggattacagcgatgtcatgcccaccagcgaggaagaaatcaaaaccactaaccctgtggccacagaggaatacggtatcgtggcagataacttgcagcagcaaaacacggctcctcaaattggaactgtcaacagccagggggccttacccggtatggtctggcagaaccgggacgtgtacctgcagggtcccatctgggccaagattcctcacacggacggcaacttccacccgtctccgctgatgggcggctttggcctgaaacatcctccgcctcagatcctgatcaagaacacgcctgtacctgcggatcctccgaccaccttcaaccagtcaaagctgaactctttcatcacgcaatacagcaccggacaggtcagcgtggaaattgaatgggagctgcagaaggaaaacagcaagcgctggaaccccgagatccagtacacctccaactactacaaatctacaagtgtggactttgctgttaatacagaaggcgtgtactctgaaccccgccccattggcacccgttacctcacccgtaatctgtaa

SEQ ID NO: 3949 - DNA, 2217 bp, Artificial Sequence
  Description of Artificial Sequence: Synthetic polynucleotide
atggctgccgatggttatcttccagattggctcgaggacaacctctctgagggcattcgcgagtggtgggcgctgaaacctggagccccgaagcccaaagccaaccagcaaaagcaggacgacggccggggtctggtgcttcctggctacaagtacctcggacccttcaacggactcgacaagggggagcccgtcaacgcggcggacgcggcggccctcgagcacgacaaggcctacgaccagcagctgcaggcgggtgacaatccgtacctgcggtataaccacgccgacgccgagtttcaggagcgtctgcaagaagatacgtcttttgggggcaacctcgggcgagcagtcttccaggccaagaagcgggttctcgaacctctcggtctggttgaggaaggcgctaagacggctcctggaaagaagagaccggtagagccatcaccccagcgttctccagactcctctacgggcatcggcaagaagggccaacagcccgccagaaaaagactcaattttggtcagactggcgactcagagtcagttccagaccctcaacctctcggagaacctccagcagcgccctctggtgtgggacctaatacaatggctgcaggcggtggcgcaccaatggcagacaatagcgaaggcgccgacggagtgggtagttcctcgggaaattggcattgcgattccacatggctgggcgacagagtcatcaccaccagcacccgaacctgggccctgcccacctacaacaaccacctctacaagcaaatctccaacgggacatcgggaggagccaccaacgacaacacctacttcggctacagcaccccctgggggtattttgactttaacagattccactgccacttttcaccacgtgactggcagcgactcatcaacaacaactggggattccggcccaagagactcagcttcaagctcttcaacatccaggtcaaggaggtcacgcagaatgaaggcaccaagaccatcgccaataacctcaccagcaccatccaggtgtttacggactcggagtaccagctgccgtacgttctcggctctgcccaccagggctgcctgcctccgttcccggcggacgtgttcacgattccccagtacggctacctaacactcaacaacggtagtcaggccgtgggacgctcctccttctactgcctggaatactttccttcgcagatgctgagaaccggcaacaacttccagtttacttacaccttcgaggacgtgcctttccacagcagctacgcccacagccagagcttggaccggctgatgaatcctctgattgaccagtacctgtactacttgtctcggattcaaacaacaggaggcacggcaaatacgcagactctgggcttcagccaaggtgggcctaatacaatggccaatcaggcaaagaactggctgccaggaccctgttaccgccaacaacgcgtctcaacgacaaccgggcaaaacaacaatagcaactttgcctggactgctgggaccaaataccatctgaatggaagaaattcattggctaatcctggcatcgctatggcaacacacaaagacgacgaggagcgtttttttcccagtaacgggatcctgatttttggcaaacaaaatgctgccagagacaatgcggattacagcgatgtcatgcccaccagcgaggaagaaatcaaaaccactaaccctgtggccacagaggaatacggtatcgtggcagataacttgcagcagcaaaacacggctcctcaaattggaactgtcaacagccagggggccttacccggtatggtctggcagaaccgggacgtgtacctgcagggtcccatctgggccaagattcctcacacggacggcaacttccacccgtctccgctgatgggcggctttggcctgaaacatcctccgcctcagatcctgatcaagaacacgcctgtacctgcggatcctccgaccaccttcaaccagtcaaagctgaactctttcatcacgcaatacagcaccggacaggtcagcgtggaaattgaatgggagctgcagaaggaaaacagcaagcgctggaaccccgagatccagtacacctccaactactacaaatctacaagtgtggactttgctgttaatacagaaggcgtgtactctgaaccccgccccattggcacccgttacctcacccgtaatctgtaa

SEQ ID NO: 3950 - DNA, 2217 bp, Artificial Sequence
  Description of Artificial Sequence: Synthetic polynucleotide
atggctgccgatggttatcttccagattggctcgaggacaacctctctgagggcattcgcgagtggtgggcgctgaaacctggagccccgaagcccaaagccaaccagcaaaagcaggacgacggccggggtctggtgcttcctggctacaagtacctcggacccttcaacggactcgacaagggggagcccgtcaacgcggcggacgcggcggccctcgagcacgacaaggcctacgaccagcagctgcaggcgggtgacaatccgtacctgcggtataaccacgccgacgccgagtttcaggagcgtctgcaagaagatacgtcttttgggggcaacctcgggcgagcagtcttccaggccaagaagcgggttctcgaacctctcggtctggttgaggaaggcgctaagacggctcctggaaagaagagaccggtagagccatcaccccagcgttctccagactcctctacgggcatcggcaagaagggccaacagcccgccagaaaaagactcaattttggtcagactggcgactcagagtcagttccagaccctcaacctctcggagaacctccagcagcgccctctggtgtgggacctaatacaatggctgcaggcggtggcgcaccaatggcagacaataacgaaggcgccgacggagtgggtagttcctcgggaaattggcattgcgattccacatggctgggcgacagagtcatcaccaccagcacccgaacctgggccctgcccacctacaacaaccacctctacaagcaaatctccaacgggacatcgggaggagccaccaacgacaacacctacttcggctacagcaccccctgggggtattttgactttaacagattccactgccacttttcaccacgtgactggcagcgactcatcaacaacaactggggattccggcccaagagactcagcttcaagctcttcaacatccaggtcaaggaggtcacgcagaatgaaggcaccaagaccatcgccaataacctcaccagcaccatccaggtgtttacggactcggagtaccagctgccgtacgttctcggctctgcccaccagggctgcctgcctccgttcccggcggacgtgttcacgattccccagtacggctacctaacactcaacaacggtagtcaggccgtgggacgctcctccttctactgcctggaatactttccttcgcagatgctgagaaccggcaacaacttccagtttacttacaccttcgaggacgtgcctttccacagcagctacgcccacagccagagcttggaccggctgatgaatcctctgattgaccagtacctgtactacttgtctcggattcaaacaacaggaggcacggcaaatacgcagactctgggcttcagccaaggtgggcctaatacaatggccaatcaggcaaagaactggctgccaggaccctgttaccgccaacaacgcgtctcaacgacaaccgggcaaaacaacaatagcaactttgcctggactgctgggaccaaataccatctgaatggaagaaattcattggctaatcctggcatcgctatggcaacacacaaagacgacgaggagcgtttttttcccagtaacgggatcctgatttttggcaaacaaaatgctgccagagacaatgcggattacggcgatgtcatgcccaccagcgaggaagaaatcaaaaccactaaccctgtggccacagaggaatacggtatcgtggcagataacttgcagcagcaaaacacggctcctcaaattggaactgtcaacagccagggggccttacccggtatggtctggcagaaccgggacgtgtacctgcagggtcccatctgggccaagattcctcacacggacggcaacttccacccgtctccgctgatgggcggctttggcctgaaacatcctccgcctcagatcctgatcaagaacacgcctgtacctgcggatcctccgaccaccttcaaccagtcaaagctgaactctttcatcacgcaatacagcaccggacaggtcagcgtggaaattgaatgggagctgcagaaggaaaacagcaagcgctggaaccccgagatccagtacacctccaactactacaaatctacaagtgtggactttgctgttaatacagaaggcgtgtactctgaaccccgccccattggcacccgttacctcacccgtaatctgtaa

SEQ ID NO: 3951 - DNA, 2217 bp, Artificial Sequence
  Description of Artificial Sequence: Synthetic polynucleotide
atggctgccgatggttatcttccagattggctcgaggacaacctctctgagggcattcgcgagtggtgggcgctgaaacctggagccccgaagcccaaagccaaccagcaaaagcaggacgacggccggggtctggtgcttcctggctacaagtacctcggacccttcaacggactcgacaagggggagcccgtcaacgcggcggacgcggcggccctcgagcacgacaaggcctacgaccagcagctgcaggcgggtgacaatccgtacctgcggtataaccacgccgacgccgagtttcaggagcgtctgcaagaagatacgtcttttgggggcaacctcgggcgagcagtcttccaggccaagaagcgggttctcgaacctctcggtctggttgaggaaggcgctaagacggctcctggaaagaggagaccggtagagccatcaccccagcgttctccagactcctctacgggcatcggcaagaagggccaacagcccgccagaaaaagactcaattttggtcagactggcgactcagagtcagttccagaccctcaacctctcggagaacctccagcagcgccctctggtgtgggacctaatacaatggctgcaggcggtggcgcaccaatggcagacaataacgaaggcgccgacggagtgggtagttcctcgggaaattggcattgcgattccacatggctgggcgacagagtcatcaccaccagcacccgaacctgggccctgcccacctacaacaaccacctctacaagcaaatctccaacgggacatcgggaggagccaccaacgacaacacctacttcggctacagcaccccctgggggtattttgactttaacagattccactgccacttttcaccacgtgactggcagcgactcatcaacaacaactggggattccggcccaagagactcagcttcaagctcttcaacatccaggtcaaggaggtcacgcagaatgaaggcaccaagaccatcgccaataacctcaccagcaccatccaggtgtttacggactcggagtaccagctgccgtacgttctcggctctgcccaccagggctgcctgcctccgttcccggcggacgtgttcacgattccccagtacggctacctaacactcaacaacggtagtcaggccgtgggacgctcctccttctactgcctggaatactttccttcgcagatgctgagaaccggcaacaacttccagtttacttacaccttcgaggacgtgcctttccacagcagctacgcccacagccagagcttggaccggctgatgaatcctctgattgaccagtacctgtactacttgtctcggattcaaacaacaggaggcacggcaaatacgcagactctgggcttcagccaaggtgggcctaatacaatggccaatcaggcaaagaactggctgccaggaccctgttaccgccaacaacgcgtctcaacgacaaccgggcaaaacaacaatagcaactttgcctggactgctgggaccaaataccatctgaatggaagaaattcattggctaatcctggcatcgctatggcaacacacaaagacgacgaggagcgtttttttcccagtaacgggatcctgatttttggcaaacaaaatgctgccagagacaatgcggattacagcgatgtcatgcccaccagcgaggaagaaatcaaaaccactaaccctgtggccacagaggaatacggtatcgtggcagataacttgcagcagcaaaacacggctcctcaaattggaactgtcaacagccagggggccttacccggtatggtctggcagaaccgggacgtgtacctgcagggtcccatctgggccaagattcctcacacggacggcaacttccacccgtctccgctgatgggcggctttggcctgaaacatcctccgcctcagatcctgatcaagaacacgcctgtacctgcggatcctccgaccaccttcaaccagtcaaagctgaactctttcatcacgcaatacagcaccggacaggtcagcgtggaaattgaatgggagctgcagaaggaaaacagcaagcgctggaaccccgagatccagtacacctccaactactacaaatctacaagtgtggactttgctgttaatacagaaggcgtgtactctgaaccccgccccattggcacccgttacctcacccgtaatctgtaa

SEQ ID NO: 3952 - DNA, 2217 bp, Artificial Sequence
  Description of Artificial Sequence: Synthetic polynucleotide
atggctgccgatggttatcttccagattggctcgaggacaacctctctgagggcattcgcgagtggtgggcgctgaaacctggagccccgaagcccaaagccaaccagcaaaagcaggacgacggccggggtctggtgcttcctggctacaagtacctcggacccttcaacggactcgacaagggggagcccgtcaacgcggcggacgcggcggccctcgagcacgacaaggcctacgaccagcagctgcaggcgggtgacaatccgtacctgcggtataaccacgccgacgccgagtttcaggagcgtctgcaagaagatacgtcttttgggggcaacctcgggcgagcagtcttccaggccaagaagcgggttctcgaacctctcggtctggttgaggaaggcgctaagacggctcctggaaagaagagaccggtagagccatcaccccagcgttctccagactcctctacgggcatcggcaagaagggccaacagcccgccagaaaaagactcaattttggtcagactggcgactcagagtcagttccagaccctcaacctctcggagaacctccagcagcgccctctggtgtgggacctaatacaatggctgcaggcggtggcgcaccaatggcagacaataacgaaggcgccgacggagtgggtagttcctcgggaaattggcattgcgattccacatggctgggcgacagagtcatcaccaccagcacccgaacctgggccctgcccacctacaacaaccacctctacaagcaaatctccaacgggacatcgggaggagccaccaacgacaacacctacttcggctacagcaccccctgggggtattttgactttaacagattccactgccacttttcaccacgtgactggcagcgactcatcaacaacaactggggattccggcccaagagactcagcttcaagctcttcaacatccaggtcaaggaggtcacgcagaatgaaggcaccaagaccatcgccaataacctcaccagcaccatccaggtgtttacggactcggagtaccagctgccgtacgttctcggctctgcccaccagggctgcctgcctccgttcccggcggacgtgttcacgattccccagtacggctacctaacactcaacaacggtagtcaggccgtgggacgctcctccttctactgcctggaatactttccttcgcagatgctgagaaccggcaacaacttccagtttacttacaccttcgaggacgtgcctttccacagcagctacgcccacagccagagcttggaccggctgatgaatcctctgattgaccagtacctgtactacttgtctcggattcaaacaacaggaggcacggcaaatacgcagactctgggcttcagccaaggtgggcctaatacaatggccaatcaggcaaagaactggctgccaggaccctgttaccgccaacaacgcgtcccaacgacaaccgggcaaaacaacaatagcaactttgcctggactgctgggaccaaataccatctgaatggaagaaattcattggctaatcctggcatcgctatggcaacacacaaagacgacgaggagcgtttttttcccagtaacgggatcctgatttttggcaaacaaaatgctgccagagacaatgcggattacagcgatgtcatgcccaccagcgaggaagaaatcaaaaccactaaccctgtggccacagaggaatacggtatcgtggcagataacttgcagcagcaaaacacggctcctcaaattggaactgtcaacagccagggggccttacccggtatggtctggcagaaccgggacgtgtacctgcagggtcccatctgggccaagattcctcacacggacggcaacttccacccgtctccgctgatgggcggctttggcctgaaacatcctccgcctcagatcctgatcaagaacacgcctgtacctgcggatcctccgaccaccttcaaccagtcaaagctgaactctttcatcacgcaatacagcaccggacaggtcagcgtggaaattgaatgggagctgcagaaggaaaacagcaagcgctggaaccccgagatccagtacacctccaactactacaaatctacaagtgtggactttgctgttaatacagaaggcgtgtactctgaaccccgccccattggcacccgttacctcacccgtaatctgtaa

SEQ ID NO: 3953 - DNA, 2217 bp, Artificial Sequence
  Description of Artificial Sequence: Synthetic polynucleotide
atggctgccgatggttatcttccagattggctcgaggacaacctctctgagggcattcgcgagtggtgggcgctgaaacctggagccccgaagcccaaagccaaccagcaaaagcaggacgacggccggggtctggtgcttcctggctacaagtacctcggacccttcaacggactcgacaagggggagcccgtcaacgcggcggacgcggcggccctcgagcacgacaaggcctacgaccagcagctgcaggcgggtgacaatccgtacctgcggtataaccacgccgacgccgagtttcaggagcgtctgcaagaagatacgtcttttgggggcaacctcgggcgagcagtcttccaggccaagaagcgggttctcgaacctctcggtctggttgaggaaggcgctaagacggctcctggaaagaagagaccggtagagccatcaccccagcgttctccagactcctctacgggcatcggcaagaagggccaacagcccgccagaaaaagactcaattttggtcagactggcgactcagagtcagttccagaccctcaacctctcggagaacctccagcagcgccctctggtgtgggacctaatacaatggctgcaggcggtggcgcaccaatggcagacaataacgaaggcgccgacggagtgggtagttcctcgggaaattggcattgcgattccacatggctgggcgacagagtcatcaccaccagcacccgaacctgggccctgcccacctacaacaaccacctctacaagcaaatctccaacgggacatcgggaggagccaccaacgacaacacctacttcggctacagcaccccctgggggtattttgactttaacagattccactgccacttttcaccacgtgactggcagcgactcatcaacaacaactggggattccggcccaagagactcagcttcaagctcttcaacatccaggtcaaggaggtcacgcagaatgaaggcaccaagaccatcgccaataacctcaccagcaccatccaggtgtttacggactcggagtaccagctgccgtacgttctcggctctgcccaccagggctgcctgcctccgttcccggcggacgtgttcacgattccccagtacggctacctaacactcaacaacggtagtcaggccgtgggacgctcctccttctactgcctggaatactttccttcgcagatgctgagaaccggcaacaacttccagtttacttacaccttcgaggacgtgcctttccacagcagctacgcccacagccagagcttggaccggctgatgaatcctctgattgaccagtacctgtactacttgtctcggattcaaacaacaggaggcacggcaaatacgcagactctgggcttcagccaaggtgggcctaatacaatggccaatcaggcaaagaactggctgccaggaccctgttaccgccaacaacgcgtctcaacgacaaccgggcaaaacaacaatagcaactttgcctggactgctgggaccaaataccatctgaatggaagaaattcattggctaatcctggcatcgctatggcaacacacaaagacgacgaggagcgtttttttcccagtaacgggatcctgatttttggcaaacaaaatgctgccagagacaatgcggattacagcgatgtcatgcccaccagcgaggaagaaatcaaaaccactaaccctgtggccacagaggaatacggtatcgtggcagataacttgcagcagcaaaacacggctcctcaaattggaactgtcaacagccagggggccttacccggtatggtctggcagaaccgggacgtgtacctgcagggtcccatctgggccaagattcctcacacggacggcaacttccacccgtctccgctgatgggcggctttggcctgaaacatcctccgcctcagatcctgatcaagaacacgcctgtacctgcggatcctccgaccaccttcaaccagtcaaagctgaactctttcatcacgcaatacagcaccggacaggtcagcgtggaaattgaatgggagctgcagaaggaaaacagcaagcgctggaaccccgagatccagtacacctccaactactacaaatctacaagtgtggactttgctgttaatacagaaggcgtgtactctgaaccccgccccattggcacccgttacctcacccgtaatctgtaa

SEQ ID NO: 3954 - DNA, 2217 bp, Artificial Sequence
  Description of Artificial Sequence: Synthetic polynucleotide
atggctgccgatggttatcttccagattggctcgaggacaacctctctgagggcattcgcgagtggtgggcgctgaaacctggagccccgaagcccaaagccaaccagcaaaagcaggacgacggccggggtctggtgcttcctggctacaagtacctcggacccttcaacggactcgacaagggggagcccgtcaacgcggcggacgcggcggccctcgagcacgacaaggcctacgaccagcagctgcaggcgggtgacaatccgtacctgcggtataaccacgccgacgccgagtttcaggagcgtctgcaagaagatacgtcttttgggggcaacctcgggcgagcagtcttccaggccaagaagcgggttctcgaacctctcggtctggttgaggaaggcgctaagacggctcctggaaagaagagaccggtagagccatcaccccagcgttctccagactcctctacgggcatcggcaagaagggccaacagcccgccagaaaaagactcaattttggtcagactggcgactcagagtcagttccagaccctcaacctctcggagaacctccagcagcgccctctggtgtgggacctaatacaatggctgcaggcggtggcgcaccaatggcagacaataacgaaggcgccgacggagtgggtagttcctcgggaaattggcattgcgattccacatggctgggcgacagagtcatcaccaccagcacccgaacctgggccctgcccacctacaacaaccacctctacaagcaaatctccaacgggacatcgggaggagccaccaacgacaacacctacttcggctacagcaccccctgggggtattttgactttaacagattccaccgccacttttcaccacgtgactggcagcgactcatcaacaacaactggggattccggcccaagagactcagcttcaagctcttcaacatccaggtcaaggaggtcacgcagaatgaaggcaccaagaccatcgccaataacctcaccagcaccatccaggtgtttacggactcggagtaccagctgccgtacgttctcggctctgcccaccagggctgcctgcctccgttcccggcggacgtgttcacgattccccagtacggctacctaacactcaacaacggtagtcaggccgtgggacgctcctccttctactgcctggaatactttccttcgcagatgctgagaaccggcaacaacttccagtttacttacaccttcgaggacgtgcctttccacagcagctacgcccacagccagagcttggaccggctgatgaatcctctgattgaccagtacctgtactacttgtctcggattcaaacaacaggaggcacggcaaatacgcagactctgggcttcagccaaggtgggcctaatacaatggccaatcaggcaaagaactggctgccaggaccctgttaccgccaacaacgcgtctcaacgacaaccgggcaaaacaacaatagcaactttgcctggactgctgggaccaaataccatctgaatggaagaaattcattggctaatcctggcatcgctatggcaacacacaaagacgacgaggagcgtttttttcccagtaacgggatcctgatttttggcaaacaaaatgctgccagagacaatgcggattacagcgatgtcatgcccaccagcgaggaagaaatcaaaaccactaaccctgtggccacagaggaatacggtatcgtggcagataacttgcagcagcaaaacacggctcctcaaattggaactgtcaacagccagggggccttacccggtatggtctggcagaaccgggacgtgtacctgcagggtcccatctgggccaagattcctcacacggacggcaacttccacccgtctccgctgatgggcggctttggcctgaaacatcctccgcctcagatcctgatcaagaacacgcctgtacctgcggatcctccgaccaccttcaaccagtcaaagctgaactctttcatcacgcaatacagcaccggacaggtcagcgtggaaattgaatgggagctgcagaaggaaaacagcaagcgctggaaccccgagatccagtacacctccaactactacaaatctacaagtgtggactttgctgttaatacagaaggcgtgtactctgaaccccgccccattggcacccgttacctcacccgtaatctgtaa

SEQ ID NO: 3955 - DNA, 2217 bp, Artificial Sequence
  Description of Artificial Sequence: Synthetic polynucleotide
atggctgccgatggttatcttccagattggctcgaggacaacctctctgagggcattcgcgagtggtgggcgctgaaacctggagccccgaagcccaaagccaaccagcaaaagcaggacgacggccggggtctggtgcttcctggctacaagtacctcggacccttcaacggactcgacaagggggagcccgtcaacgcggcggacgcggcggccctcgagcacgacaaggcctacgaccagcagctgcaggcgggtgacaatccgtacctgcggtataaccacgccgacgccgagtttcaggagcgtctgcaagaagatacgtcttttgggggcaacctcgggcgagcagtcttccaggccaagaagcgggttctcgaacctctcggtctggttgaggaaggcgctaagacggctcctggaaagaagagaccggtagagccatcaccccagcgttctccagactcctctacgggcatcggcaagaagggccaacagcccgccagaaaaagactcaattttggtcagactggcgactcagagtcagttccagaccctcaacctctcggagaacctccagcagcgccctctggtgtgggacctaatacaatggctgcaggcggtggcgcaccaatggcagacaataacgaaggcgccgacggagtgggtagttcctcgggaaattggcattgcgattccacatggctgggcgacagagtcatcaccaccagcacccgaacctgggccctgcccacctacaacaaccacctctacaagcaaatctccaacgggacatcgggaggagccaccaacgacaacacctacttcggctacagcaccccctgggggtattttgactttaacagattccactgccacttttcaccacgtgactggcagcgactcatcaacaacaactggggattccggcccaagagactcagcttcaagctcttcaacatccaggtcaaggaggtcacgcagaatgaaggcaccaagaccatcgccaataacctcaccagcaccatccaggtgtttacggactcggagtgccagctgccgtacgttctcggctctgcccaccagggctgcctgcctccgttcccggcggacgtgttcacgattccccagtacggctacctaacactcaacaacggtagtcaggccgtgggacgctcctccttctactgcctggaatactttccttcgcagatgctgagaaccggcaacaacttccagtttacttacaccttcgaggacgtgcctttccacagcagctacgcccacagccagagcttggaccggctgatgaatcctctgattgaccagtacctgtactacttgtctcggattcaaacaacaggaggcacggcaaatacgcagactctgggcttcagccaaggtgggcctaatacaatggccaatcaggcaaagaactggctgccaggaccctgttaccgccaacaacgcgtctcaacgacaaccgggcaaaacaacaatagcaactttgcctggactgctgggaccaaataccatctgaatggaagaaattcattggctaatcctggcatcgctatggcaacacacaaagacgacgaggagcgtttttttcccagtaacgggatcctgatttttggcaaacaaaatgctgccagagacaatgcggattacagcgatgtcatgcccaccagcgaggaagaaatcaaaaccactaaccctgtggccacagaggaatacggtatcgtggcagataacttgcagcagcaaaacacggctcctcaaattggaactgtcaacagccagggggccttacccggtatggtctggcagaaccgggacgtgtacctgcagggtcccatctgggccaagattcctcacacggacggcaacttccacccgtctccgctgatgggcggctttggcctgaaacatcctccgcctcagatcctgatcaagaacacgcctgtacctgcggatcctccgaccaccttcaaccagtcaaagctgaactctttcatcacgcaatacagcaccggacaggtcagcgtggaaattgaatgggagctgcagaaggaaaacagcaagcgctggaaccccgagatccagtacacctccaactactacaaatctacaagtgtggactttgctgttaatacagaaggcgtgtactctgaaccccgccccattggcacccgttacctcacccgtaatctgtaa

SEQ ID NO: 3956 - DNA, 2217 bp, Artificial Sequence
  Description of Artificial Sequence: Synthetic polynucleotide
atggctgccgatggttatcttccagattggctcgaggacaacctctctgagggcattcgcgagtggtgggcgctgaaacctggagccccgaagcccaaagccaaccagcaaaagcaggacgacggccggggtctggtgcttcctggctacaagtacctcggacccttcaacggactcgacaagggggagcccgtcaacgcggcggacgcggcggccctcgagcacgacaaggcctacgaccagcagctgcaggcgggtgacaatccgtacctgcggtataaccacgccgacgccgagtttcaggagcgtctgcaagaagatacgtcttttgggggcaacctcgggcgagcagtcttccaggccaagaagcgggttctcgaacctctcggtctggttgaggaaggcgctaagacggctcctggaaagaagagaccggtagagccatcaccccagcgttctccagactcctctacgggcatcggcaagaagggccaacagcccgccagaaaaagactcaattttggtcagactggcgactcagagtcagttccagaccctcaacctctcggagaacctccagcagcgccctctggtgtgggacctaatacaatggctgcaggcggtggcgcaccaatggcagacaataacgaaggcgccgacggagtgggtagttcctcgggaaattggcattgcgattccacatggctgggcgacagagtcatcaccaccagcacccgaacctgggccctgcccacctacaacaaccacctctacaagcaaatctccaacgggacatcgggaggagccaccaacgacaacgcctacttcggctacagcaccccctgggggtattttgactttaacagattccactgccacttttcaccacgtgactggcagcgactcatcaacaacaactggggattccggcccaagagactcagcttcaagctcttcaacatccaggtcaaggaggtcacgcagaatgaaggcaccaagaccatcgccaataacctcaccagcaccatccaggtgtttacggactcggagtaccagctgccgtacgttctcggctctgcccaccagggctgcctgcctccgttcccggcggacgtgttcacgattccccagtacggctacctaacactcaacaacggtagtcaggccgtgggacgctcctccttctactgcctggaatactttccttcgcagatgctgagaaccggcaacaacttccagtttacttacaccttcgaggacgtgcctttccacagcagctacgcccacagccagagcttggaccggctgatgaatcctctgattgaccagtacctgtactacttgtctcggattcaaacaacaggaggcacggcaaatacgcagactctgggcttcagccaaggtgggcctaatacaatggccaatcaggcaaagaactggctgccaggaccctgttaccgccaacaacgcgtctcaacgacaaccgggcaaaacaacaatagcaactttgcctggactgctgggaccaaataccatctgaatggaagaaattcattggctaatcctggcatcgctatggcaacacacaaagacgacgaggagcgtttttttcccagtaacgggatcctgatttttggcaaacaaaatgctgccagagacaatgcggattacagcgatgtcatgcccaccagcgaggaagaaatcaaaaccactaaccctgtggccacagaggaatacggtatcgtggcagataacttgcagcagcaaaacacggctcctcaaattggaactgtcaacagccagggggccttacccggtatggtctggcagaaccgggacgtgtacctgcagggtcccatctgggccaagattcctcacacggacggcaacttccacccgtctccgctgatgggcggctttggcctgaaacatcctccgcctcagatcctgatcaagaacacgcctgtacctgcggatcctccgaccaccttcaaccagtcaaagctgaactctttcatcacgcaatacagcaccggacaggtcagcgtggaaattgaatgggagctgcagaaggaaaacagcaagcgctggaaccccgagatccagtacacctccaactactacaaatctacaagtgtggactttgctgttaatacagaaggcgtgtactctgaaccccgccccattggcacccgttacctcacccgtaatctgtaa

SEQ ID NO: 3957 - DNA, 2217 bp, Artificial Sequence
  Description of Artificial Sequence: Synthetic polynucleotide
atggctgccgatggttatcttccagattggctcgaggacaacctctctgagggcattcgcgagtggtgggcgctgaaacctggagccccgaagcccaaagccaaccagcaaaagcaggacgacggccggggtctggtgcttcctggctacaagtacctcggacccttcaacggactcgacaagggggagcccgtcaacgcggcggacgcggcggccctcgagcacgacaaggcctacgaccagcagctgcaggcgggtgacaatccgtacctgcggtataaccacgccgacgccgagtttcaggagcgtctgcaagaagatacgtcttttgggggcaacctcgggcgagcagtcttccaggccaagaagcgggttctcgaacctctcggtctggttgaggaaggcgctaagacggctcctggaaagaagagaccggtagagccatcaccccagcgttctccagactcctctacgggcatcggcaagaagggccaacagcccgccagaaaaagactcaattttggtcagactggcgactcagagtcagttccagaccctcaacctctcggagaacctccagcagcgccctctggtgtgggacctaatacaatggctgcaggcggtggcgcaccaatggcagacaataacgaaggcgccgacggagtgggtagttcctcgggaaattggcattgcgattccacatggctgggcgacagagtcatcaccaccagcacccgaacctgggccctgcccacctacaacaaccacctctacaagcaaatctccaacgggacatcgggaggagccaccaacgacaacacctacttcggctacagcaccccctgggggtattttgactttaacagattccactgccacttttcaccacgtgactggcagcgactcatcaacaacaactggggattccggcccaagagactcagcttcaagctcttcaacatccaggtcaaggaggtcacgcagaatgaaggcaccaagaccatcgccaataacctcaccagcaccatccaggtgtttacggactcggagtaccagctgccgtacgttctcggctctgcccaccagggctgcctgcctccgttcccggcggacgtgttcacgattccccagtacggctacctaacactcaacaacggtagtcaggccgtgggacgctcctccttctactgcctggaatactttccttcgcagatgctgagaaccggcaacaacttccagtttacttacaccttcgaggacgtgcctttccacagcagctacgcccacagccagagcttggaccggctgatgaatcctctgattgaccagtacctgtactacttgtctcggattcaaacaacaggaggcacggcaaatacgcagactctgggcttcagccaaggtgggcctaatacaatggccaatcaggcaaagaactggctgccaggaccctgttaccgccaacaacgcgtctcaacgacaaccgggcaaaacaacaatagcaactttgcctggactgctgggaccaaataccatctgaatggaagaaattcattggctaatcctggcatcgctatggcaacacacaaagacgacgaggagcgtttttttcccagtaacgggatcctgatttttggcaaacaaaatgctgccagaggcaatgcggattacagcgatgtcatgcccaccagcgaggaagaaatcaaaaccactaaccctgtggccacagaggaatacggtatcgtggcagataacttgcagcagcaaaacacggctcctcaaattggaactgtcaacagccagggggccttacccggtatggtctggcagaaccgggacgtgtacctgcagggtcccatctgggccaagattcctcacacggacggcaacttccacccgtctccgctgatgggcggctttggcctgaaacatcctccgcctcagatcctgatcaagaacacgcctgtacctgcggatcctccgaccaccttcaaccagtcaaagctgaactctttcatcacgcaatacagcaccggacaggtcagcgtggaaattgaatgggagctgcagaaggaaaacagcaagcgctggaaccccgagatccagtacacctccaactactacaaatctacaagtgtggactttgctgttaatacagaaggcgtgtactctgaaccccgccccattggcacccgttacctcacccgtaatctgtaa

SEQ ID NO: 3958 - DNA, 2217 bp, Artificial Sequence
  Description of Artificial Sequence: Synthetic polynucleotide
atggctgccgatggttatcttccagattggctcgaggacaacctctctgagggcattcgcgagtggtgggcgctgaaacctggagccccgaagcccaaagccaaccagcaaaagcaggacgacggccggggtctggtgcttcctggctacaagtacctcggacccttcaacggactcgacaagggggagcccgtcaacgcggcggacgcggcggccctcgagcacgacaaggcctacgaccagcagctgcaggcgggtgacaatccgtacctgcggtataaccacgccgacgccgagtttcaggagcgtctgcaagaagatacgtcttttgggggcaacctcgggcgagcagtcttccaggccaagaagcgggttctcgaacctctcggtctggttgaggaaggcgctaagacggctcctggaaagaagagaccggtagagccatcaccccagcgttctccagactcctctacgggcatcggcaagaagggccaacagcccgccagaaaaagactcaattttggtcagactggcgactcagagtcagttccagaccctcaacctctcggagaacctccagcagcgccctctggtgtgggacctaatacaatggctgcaggcggtggcgcaccaatggcagacaataacgaaggcgccgacggagtgggtagttcctcgggaaattggcattgcgattccacatggctgggcgacagagtcatcaccaccagcacccgaacctgggccctgcccacctacaacaaccacctctacaagcaaatctccaacgggacatcgggaggagccaccaacgacaacacctacttcggctacagcaccccctgggggtattttgactttaacagattccactgccacttttcaccacgtgactggcagcgactcatcaacaacaactggggattccggcccaagagactcagcttcaagctcttcaacatccaggtcaaggaggtcacgcagaatgaaggcaccaagaccatcgccaataacctcaccagcaccatccaggtgtttacggactcggagtaccagctgccgtacgttctcggctctgcccaccagggctgcctgcctccgttcccggcggacgtgttcacgattccccagtacggctacctaacactcaacaacggtagtcaggccgtgggacgctcctccttctactgcctggaatactttccttcgcagatgctgggaaccggcaacaacttccagtttacttacaccttcgaggacgtgcctttccacagcagctacgcccacagccagagcttggaccggctgatgaatcctctgattgaccagtacctgtactacttgtctcggattcaaacaacaggaggcacggcaaatacgcagactctgggcttcagccaaggtgggcctaatacaatggccaatcaggcaaagaactggctgccaggaccctgttaccgccaacaacgcgtctcaacgacaaccgggcaaaacaacaatagcaactttgcctggactgctgggaccaaataccatctgaatggaagaaattcattggctaatcctggcatcgctatggcaacacacaaagacgacgaggagcgtttttttcccagtaacgggatcctgatttttggcaaacaaaatgctgccagagacaatgcggattacagcgatgtcatgcccaccagcgaggaagaaatcaaaaccactaaccctgtggccacagaggaatacggtatcgtggcagataacttgcagcagcaaaacacggctcctcaaattggaactgtcaacagccagggggccttacccggtatggtctggcagaaccgggacgtgtacctgcagggtcccatctgggccaagattcctcacacggacggcaacttccacccgtctccgctgatgggcggctttggcctgaaacatcctccgcctcagatcctgatcaagaacacgcctgtacctgcggatcctccgaccaccttcaaccagtcaaagctgaactctttcatcacgcaatacagcaccggacaggtcagcgtggaaattgaatgggagctgcagaaggaaaacagcaagcgctggaaccccgagatccagtacacctccaactactacaaatctacaagtgtggactttgctgttaatacagaaggcgtgtactctgaaccccgccccattggcacccgttacctcacccgtaatctgtaa

SEQ ID NO: 3959 - DNA, 2217 bp, Artificial Sequence
  Description of Artificial Sequence: Synthetic polynucleotide
atggctgccgatggttatcttccagattggctcgaggacaacctctctgagggcattcgcgagtggtgggcgctgaaacctggagccccgaagcccaaagccaaccagcaaaagcaggacgacggccggggtctggtgcttcctggctacaagtacctcggacccttcaacggactcgacaagggggagcccgtcaacgcggcggacgcggcggccctcgagcacgacaaggcctacgaccagcagctgcaggcgggtgacaatccgcacctgcggtataaccacgccgacgccgagtttcaggagcgtctgcaagaagatacgtcttttgggggcaacctcgggcgagcagtcttccaggccaagaagcgggttctcgaacctctcggtctggttgaggaaggcgctaagacggctcctggaaagaagagaccggtagagccatcaccccagcgttctccagactcctctacgggcatcggcaagaagggccaacagcccgccagaaaaagactcaattttggtcagactggcgactcagagtcagttccagaccctcaacctctcggagaacctccagcagcgccctctggtgtgggacctaatacaatggctgcaggcggtggcgcaccaatggcagacaataacgaaggcgccgacggagtgggtagttcctcgggaaattggcattgcgattccacatggctgggcgacagagtcatcaccaccagcacccgaacctgggccctgcccacctacaacaaccacctctacaagcaaatctccaacgggacatcgggaggagccaccaacgacaacacctacttcggctacagcaccccctgggggtattttgactttaacagattccactgccacttttcaccacgtgactggcagcgactcatcaacaacaactggggattccggcccaagagactcagcttcaagctcttcaacatccaggtcaaggaggtcacgcagaatgaaggcaccaagaccatcgccaataacctcaccagcaccatccaggtgtttacggactcggagtaccagctgccgtacgttctcggctctgcccaccagggctgcctgcctccgttcccggcggacgtgttcacgattccccagtacggctacctaacactcaacaacggtagtcaggccgtgggacgctcctccttctactgcctggaatactttccttcgcagatgctgagaaccggcaacaacttccagtttacttacaccttcgaggacgtgcctttccacagcagctacgcccacagccagagcttggaccggctgatgaatcctctgattgaccagtacctgtactacttgtctcggattcaaacaacaggaggcacggcaaatacgcagactctgggcttcagccaaggtgggcctaatacaatggccaatcaggcaaagaactggctgccaggaccctgttaccgccaacaacgcgtctcaacgacaaccgggcaaaacaacaatagcaactttgcctggactgctgggaccaaataccatctgaatggaagaaattcattggctaatcctggcatcgctatggcaacacacaaagacgacgaggagcgtttttttcccagtaacgggatcctgatttttggcaaacaaaatgctgccagagacaatgcggattacagcgatgtcatgcccaccagcgaggaagaaatcaaaaccactaaccctgtggccacagaggaatacggtatcgtggcagataacttgcagcagcaaaacacggctcctcaaattggaactgtcaacagccagggggccttacccggtatggtctggcagaaccgggacgtgtacctgcagggtcccatctgggccaagattcctcacacggacggcaacttccacccgtctccgctgatgggcggctttggcctgaaacatcctccgcctcagatcctgatcaagaacacgcctgtacctgcggatcctccgaccaccttcaaccagtcaaagctgaactctttcatcacgcaatacagcaccggacaggtcagcgtggaaattgaatgggagctgcagaaggaaaacagcaagcgctggaaccccgagatccagtacacctccaactactacaaatctacaagtgtggactttgctgttaatacagaaggcgtgtactctgaaccccgccccattggcacccgttacctcacccgtaatctgtaa

SEQ ID NO: 3960 - DNA, 2217 bp, Artificial Sequence
  Description of Artificial Sequence: Synthetic polynucleotide
atggctgccgatggttatcttccagattggctcgaggacaacctctctgagggcattcgcgagtggtgggcgctgaaacctggagccccgaagcccaaagccaaccagcaaaagcaggacgacggccggggtctggtgcttcctggctacaagtacctcggacccttcaacggactcgacaagggggagcccgtcaacgcggcggacgcggcggccctcgagcacgacaaggcctacgaccagcagctgcaggcgggtgacaatccgtacctgcggtataaccacgccgacgccgagtttcaggagcgtctgcaagaagatacgtcttttgggggcaacctcgggcgagcagtcttccaggccaagaagcgggttctcgaacctctcggtctggttgaggaaggcgctaagacggctcctggaaagaagagaccggtagagccatcaccccagcgttctccagactcctctacgggcatcggcaagaagggccaacagcccgccagaaaaagactcaattttggtcagactggcgactcagagtcagttccagaccctcaacctctcggagaacctccagcagcgccctctggtgtgggacctaatacaatggctgcaggcggtggcgcaccaatggcagacaataacgaaggcgccgacggagtgggtagttcctcgggaaattggcattgcgattccacatggctgggcgacagagtcatcaccaccagcacccgaacctgggccctgcccacctacaacaaccacctctacaagcaaatctccaacgggacatcgggaggagccaccaacgacaacacctacttcggctacagcaccccctgggggtattttgactttaacagattccactgccacttttcaccacgtgactggcagcgactcatcaacaacaactggggattccggcccaagagactcagcttcaagctcttcaacatccaggtcaaggaggtcacgcagaatgaaggcaccaagaccatcgccaataacctcaccagcaccatccaggtgtttacggactcggagtaccagctgccgtacgttctcggccctgcccaccagggctgcctgcctccgttcccggcggacgtgttcacgattccccagtacggctacctaacactcaacaacggtagtcaggccgtgggacgctcctccttctactgcctggaatactttccttcgcagatgctgagaaccggcaacaacttccagtttacttacaccttcgaggacgtgcctttccacagcagctacgcccacagccagagcttggaccggctgatgaatcctctgattgaccagtacctgtactacttgtctcggattcaaacaacaggaggcacggcaaatacgcagactctgggcttcagccaaggtgggcctaatacaatggccaatcaggcaaagaactggctgccaggaccctgttaccgccaacaacgcgtctcaacgacaaccgggcaaaacaacaatagcaactttgcctggactgctgggaccaaataccatctgaatggaagaaattcattggctaatcctggcatcgctatggcaacacacaaagacgacgaggagcgtttttttcccagtaacgggatcctgatttttggcaaacaaaatgctgccagagacaatgcggattacagcgatgtcatgcccaccagcgaggaagaaatcaaaaccactaaccctgtggccacagaggaatacggtatcgtggcagataacttgcagcagcaaaacacggctcctcaaattggaactgtcaacagccagggggccttacccggtatggtctggcagaaccgggacgtgtacctgcagggtcccatctgggccaagattcctcacacggacggcaacttccacccgtctccgctgatgggcggctttggcctgaaacatcctccgcctcagatcctgatcaagaacacgcctgtacctgcggatcctccgaccaccttcaaccagtcaaagctgaactctttcatcacgcaatacagcaccggacaggtcagcgtggaaattgaatgggagctgcagaaggaaaacagcaagcgctggaaccccgagatccagtacacctccaactactacaaatctacaagtgtggactttgctgttaatacagaaggcgtgtactctgaaccccgccccattggcacccgttacctcacccgtaatctgtaa

SEQ ID NO: 3961 - DNA, 2217 bp, Artificial Sequence
  Description of Artificial Sequence: Synthetic polynucleotide
atggctgccgatggttatcttccagattggctcgaggacaacctctctgagggcattcgcgagtggtgggcgctgaaacctggagccccgaagcccaaagccaaccagcaaaagcaggacgacggccggggtctggtgcttcctggctacaagtacctcggacccttcaacggactcgacaagggggagcccgtcaacgcggcggacgcggcggccctcgagcacgacaaggcctacgaccagcagctgcaggcgggtgacaatccgtacctgcggtataaccacgccgacgccgagtttcaggagcgtctgcaagaagatacgtcttttgggggcaacctcgggcgagcagtcttccaggccaagaagcgggttctcgaacctctcggtctggttggggaaggcgctaagacggctcctggaaagaagagaccggtagagccatcaccccagcgttctccagactcctctacgggcatcggcaagaagggccaacagcccgccagaaaaagactcaattttggtcagactggcgactcagagtcagttccagaccctcaacctctcggagaacctccagcagcgccctctggtgtgggacctaatacaatggctgcaggcggtggcgcaccaatggcagacaataacgaaggcgccgacggagtgggtagttcctcgggaaattggcattgcgattccacatggctgggcgacagagtcatcaccaccagcacccgaacctgggccctgcccacctacaacaaccacctctacaagcaaatctccaacgggacatcgggaggagccaccaacgacaacacctacttcggctacagcaccccctgggggtattttgactttaacagattccactgccacttttcaccacgtgactggcagcgactcatcaacaacaactggggattccggcccaagagactcagcttcaagctcttcaacatccaggtcaaggaggtcacgcagaatgaaggcaccaagaccatcgccaataacctcaccagcaccatccaggtgtttacggactcggagtaccagctgccgtacgttctcggctctgcccaccagggctgcctgcctccgttcccggcggacgtgttcacgattccccagtacggctacctaacactcaacaacggtagtcaggccgtgggacgctcctccttctactgcctggaatactttccttcgcagatgctgagaaccggcaacaacttccagtttacttacaccttcgaggacgtgcctttccacagcagctacgcccacagccagagcttggaccggctgatgaatcctctgattgaccagtacctgtactacttgtctcggattcaaacaacaggaggcacggcaaatacgcagactctgggcttcagccaaggtgggcctaatacaatggccaatcaggcaaagaactggctgccaggaccctgttaccgccaacaacgcgtctcaacgacaaccgggcaaaacaacaatagcaactttgcctggactgctgggaccaaataccatctgaatggaagaaattcattggctaatcctggcatcgctatggcaacacacaaagacgacgaggagcgtttttttcccagtaacgggatcctgatttttggcaaacaaaatgctgccagagacaatgcggattacagcgatgtcatgcccaccagcgaggaagaaatcaaaaccactaaccctgtggccacagaggaatacggtatcgtggcagataacttgcagcagcaaaacacggctcctcaaattggaactgtcaacagccagggggccttacccggtatggtctggcagaaccgggacgtgtacctgcagggtcccatctgggccaagattcctcacacggacggcaacttccacccgtctccgctgatgggcggctttggcctgaaacatcctccgcctcagatcctgatcaagaacacgcctgtacctgcggatcctccgaccaccttcaaccagtcaaagctgaactctttcatcacgcaatacagcaccggacaggtcagcgtggaaattgaatgggagctgcagaaggaaaacagcaagcgctggaaccccgagatccagtacacctccaactactacaaatctacaagtgtggactttgctgttaatacagaaggcgtgtactctgaaccccgccccattggcacccgttacctcacccgtaatctgtaa

SEQ ID NO: 3962 - DNA, 2217 bp, Artificial Sequence
  Description of Artificial Sequence: Synthetic polynucleotide
atggctgccgatggttatcttccagattggctcgaggacaacctctctgagggcattcgcgagtggtgggcgctgaaacctggagccccgaagcccaaagccaaccagcaaaagcaggacgacggccggggtctggtgcttcctggctacaagtacctcggacccttcaacggactcgacaagggggagcccgtcaacgcggcggacgcggcggccctcgagcacgacaaggcctacgaccagcagctgcaggcgggtgacaatccgtacctgcggtataaccacgccgacgccgagtttcaggagcgtctgcaagaagatacgtcttttgggggcaacctcgggcgagcagtcttccaggccaagaagcgggttctcgaacctctcggtctggttgaggaaggcgctaagacggctcctggaaagaagagaccggtagagccatcaccccagcgttctccagactcctctacgggcatcggcaagaagggccaacagcccgccagaaaaagactcaattttggtcagactggcgactcagagtcagttccagaccctcaacctctcggagaacctccagcagcgccctctggtgtgggacctaatacaatggctgcaggcggtggcgcaccaatggcagacaataacgaaggcgccgacggagtgggtagttcctcgggaaattggcattgcgattccacatggctgggcgacagagtcatcaccaccagcacccgaacctgggccctgcccacctacaacaaccacctctacaagcaaatctccaacgggacatcgggaggagccaccaacgacaacacctacttcggctacagcaccccctgggggtattttgactttaacagattccactgccacttttcaccacgtgactggcagcgactcatcaacaacaactggggattccggcccaagagactcagcttcaagctcttcaacatccaggtcaaggaggtcacgcagaatgaaggcaccaagaccatcgccaataacctcaccagcaccatccaggtgtttacggactcggagtaccagctgccgtacgttctcggctctgcccaccagggctgcctgcctccgttcccggcggacgtgttcacgattccccagtacggctacctaacactcaacaacggtagtcaggccgtgggacgctcctccttctactgcctggaatactttccttcgcagatgctgagaaccggcaacaacttccagtttacttacaccttcgaggacgtgcctttccacagcagctacgcccacagccagagcttggaccggctgatgaatcctctgattgaccagtacctgtactacttgtctcggattcaaacaacaggaggcacggcaaatacgcagactctgggcttcagccaaggtgggcctaatacaatggccaatcaggcaaagaactggctgccaggaccctgttaccgccaacaacgcgtctcaacgacaaccgggcaaaacaacaatagcaactttgcctggactgctgggaccaaataccatctgaatggaagaaattcattggctaatcctggcatcgctatggcaacacacaaagacgacgaggagcgtttttttcccagtaacgggatcctgatttttggcaaacaaaatgctgccagagacaatgcggattacagcgatgtcatgcccaccagcgaggaagaaatcaaaaccactaaccctgtggccacagaggaatacggtatcgtggcagataacttgcagcagcaaaacacggctcctcaaattggaactgtcaacagccagggggccttacccggtatggtctggcagaaccgggacgtgtacctgcagggtcccatctgggccaagattcctcacacggacggcaacttccacccgtctccgctgatgggcggctttggcctgaaacatcctccgcctcagatcctgatcaagaacacgcctgtacctgcggatcctccgaccaccttcaaccagtcaaagctgaactctttcatcacgcaatacagcaccggacaggtcagcgtggaaattgaatgggagctgcagaaggaaagcagcaagcgctggaaccccgagatccagtacacctccaactactacaaatctacaagtgtggactttgctgttaatacagaaggcgtgtactctgaaccccgccccattggcacccgttacctcacccgtaatctgtaa

SEQ ID NO: 3963 - DNA, 2217 bp, Artificial Sequence
  Description of Artificial Sequence: Synthetic polynucleotide
atggctgccgatggttatcttccagattggctcgaggacaacctctctgagggcattcgcgagtggtgggcgctgaaacctggagccccgaagcccaaagccaaccagcaaaagcaggacgacggccggggtctggtgcttcctggctacaagtacctcggacccttcaacggactcgacaagggggagcccgtcaacgcggcggacgcggcggccctcgagcacgacaaggcctacgaccagcagctgcaggcgggtgacaatccgtacctgcggtataaccacgccgacgccgagtttcaggagcgtctgcaagaagatacgtcttttgggggcaacctcgggcgagcagtcttccaggccaagaagcgggttctcgaacctctcggtctggttgaggaaggcgctaagacggctcctggaaagaagagaccggtagagccatcaccccagcgttctccagactcctctacgggcatcggcaagaagggccaacagcccgccagaaaaagactcaattttggtcagactggcgactcagagtcagttccagaccctcaacctctcggagaacctccagcagcgccctctggtgtgggacctaatacaatggctgcaggcggtggcgcaccaatggcagacaataacgaaggcgccgacggagtgggtagttcctcgggaaattggcattgcgattccacatggctgggcgacagagtcatcaccaccagcacccgaacctgggccctgcccacctacaacaaccacctctacaagcaaatctccaacgggacatcgggaggagccaccaacgacaacacctacttcggctacagcaccccctgggggtattttgactttaacagattccactgccacttttcaccacgtgactggcagcgactcatcaacaacaactggggattccggcccaagagactcagcttcaagctcttcaacatccaggtcaaggaggtcacgcagaatgaaggcaccaagaccatcgccaataacctcaccagcaccatccaggtgtttacggactcggagtaccagctgccgtacgttctcggctctgcccaccagggctgcctgcctccgttcccggcggacgtgttcacgattccccagtacggctacctaacactcaacaacggtagtcaggccgtgggacgctcctccttctactgcctggaatactttccttcgcagatgctgagaaccggcaacaacttccagtttacttacaccttcgaggacgtgcctttccacagcagctacgcccacagccagagcttggaccggctgatgaatcctctgattgaccagtacctgtactacttgtctcggattcaaacaacaggaggcacggcaaatacgcagactctgggcttcagccaaggtgggcctaatacaatggccaatcaggcaaagaactggctgccaggaccctgttaccgccaacaacgcgtctcaacgacaaccgggcaaaacaacaatagcaactttgcctggactgctgggaccaaataccatctgaatggaagaaattcattggctaatcctggcatcgctatggcaacacacaaagacgacgaggagcgtttttttcccagtaacgggatcctgatttttggcaaacaaaatgctgccagagacaatgcggattacagcgatgtcatgcccgccagcgaggaagaaatcaaaaccactaaccctgtggccacagaggaatacggtatcgtggcagataacttgcagcagcaaaacacggctcctcaaattggaactgtcaacagccagggggccttacccggtatggtctggcagaaccgggacgtgtacctgcagggtcccatctgggccaagattcctcacacggacggcaacttccacccgtctccgctgatgggcggctttggcctgaaacatcctccgcctcagatcctgatcaagaacacgcctgtacctgcggatcctccgaccaccttcaaccagtcaaagctgaactctttcatcacgcaatacagcaccggacaggtcagcgtggaaattgaatgggagctgcagaaggaaaacagcaagcgctggaaccccgagatccagtacacctccaactactacaaatctacaagtgtggactttgctgttaatacagaaggcgtgtactctgaaccccgccccattggcacccgttacctcacccgtaatctgtaa

SEQ ID NO: 3964 - DNA, 2217 bp, Artificial Sequence
  Description of Artificial Sequence: Synthetic polynucleotide
atggctgccgatggttatcttccagattggctcgaggacaacctctctgagggcattcgcgagtggtgggcgctgaaacctggagccccgaagcccaaagccaaccagcaaaagcaggacgacggccggggtctggtgcttcctggctacaagtacctcggacccttcaacggactcgacaagggggagcccgtcaacgcggcggacgcggcggccctcgagcacgacaaggcctacgaccagcagctgcaggcgggtgacaatccgtacctgcggtataaccacgccgacgccgagtttcaggagcgtctgcaagaagatacgtcttttgggggcaacctcgggcgagcagtcttccaggccaagaagcgggttctcgaacctctcggtctggttgaggaaggcgctaagacggctcctggaaagaagagaccggtagagccatcaccccagcgttctccagactcctctacgggcatcggcaagaagggccaacagcccgccagaaaaagactcaattttggtcagactggcgactcagagtcagttccagaccctcaacctctcggagaacctccagcagcgccctctggtgtgggacctaatacaatggctgcaggcggtggcgcaccaatggcagacaataacgaaggcgccgacggagtgggtagttcctcgggaaattggcattgcgattccacatggctgggcgacagagtcatcaccaccagcacccgaacctgggccctgcccacctacaacaaccacctctacaagcaaatctccaacgggacatcgggaggagccaccaacgacaacacctacttcggctacagcaccccctgggggtattttgactttaacagattccactgccacttttcaccacgtgactggcagcgactcatcaacaacaactggggattccggcccaagagactcagcttcaagctcttcaacatccaggtcaaggaggtcacgcagaatgaaggcaccaagaccatcgccaataacctcaccagcaccatccaggtgtttacggactcggagtaccagctgccgtacgttctcggctctgcccaccagggctgcctgcctccgttcccggcggacgtgctcacgattccccagtacggctacctaacactcaacaacggtagtcaggccgtgggacgctcctccttctactgcctggaatactttccttcgcagatgctgagaaccggcaacaacttccagtttacttacaccttcgaggacgtgcctttccacagcagctacgcccacagccagagcttggaccggctgatgaatcctctgattgaccagtacctgtactacttgtctcggattcaaacaacaggaggcacggcaaatacgcagactctgggcttcagccaaggtgggcctaatacaatggccaatcaggcaaagaactggctgccaggaccctgttaccgccaacaacgcgtctcaacgacaaccgggcaaaacaacaatagcaactttgcctggactgctgggaccaaataccatctgaatggaagaaattcattggctaatcctggcatcgctatggcaacacacaaagacgacgaggagcgtttttttcccagtaacgggatcctgatttttggcaaacaaaatgctgccagagacaatgcggattacagcgatgtcatgcccaccagcgaggaagaaatcaaaaccactaaccctgtggccacagaggaatacggtatcgtggcagataacttgcagcagcaaaacacggctcctcaaattggaactgtcaacagccagggggccttacccggtatggtctggcagaaccgggacgtgtacctgcagggtcccatctgggccaagattcctcacacggacggcaacttccacccgtctccgctgatgggcggctttggcctgaaacatcctccgcctcagatcctgatcaagaacacgcctgtacctgcggatcctccgaccaccttcaaccagtcaaagctgaactctttcatcacgcaatacagcaccggacaggtcagcgtggaaattgaatgggagctgcagaaggaaaacagcaagcgctggaaccccgagatccagtacacctccaactactacaaatctacaagtgtggactttgctgttaatacagaaggcgtgtactctgaaccccgccccattggcacccgttacctcacccgtaatctgtaa

SEQ ID NO: 3965 - DNA, 2217 bp, Artificial Sequence
  Description of Artificial Sequence: Synthetic polynucleotide
atggctgccgatggttatcttccagattggctcgaggacaacctctctgagggcattcgcgagtggtgggcgctgaaacctggagccccgaagcccaaagccaaccagcaaaagcaggacgacggccggggtctggtgcttcctggctacaagtacctcggacccttcaacggactcgacaagggggagcccgtcaacgcggcggacgcggcggccctcgagcacgacaaggcctacgaccagcagctgcaggcgggtgacaatccgtacctgcggtataaccacgccgacgccgagtttcaggagcgtctgcaagaagatacgtcttttgggggcaacctcgggcgagcagtcttccaggccaagaagcgggttctcgaacctctcggtctggttgaggaaggcgctaagacggctcctggaaagaagagaccggtagagccatcaccccagcgttctccagactcctctacgggcatcggcaagaagggccaacagcccgccagaaaaagactcaattttggtcagactggcgactcagagtcagttccagaccctcaacctctcggagaacctccagcagcgccctctggtgtgggacctaatacaatggctgcaggcggtggcgcaccaatggcagacaataacgaaggcgccgacggagtgggtagttcctcgggaaattggcattgcgattccacatggctgggcgacagagtcatcaccaccagcacccgaacctgggccctgcccacctacaacaaccacctctacaagcaaatctccaacgggacatcgggaggagccaccaacgacaacacctacttcggctacagcaccccctgggggtattttgactttaacagattccactgccacttttcaccacgtgactggcagcgactcatcaacaacaactggggattccggcccaagagactcagcttcaagctcttcaacatccaggtcaaggaggtcacgcagaatgaaggcaccaagaccatcgccaataacctcaccagcaccatccgggtgtttacggactcggagtaccagctgccgtacgttctcggctctgcccaccagggctgcctgcctccgttcccggcggacgtgttcacgattccccagtacggctacctaacactcaacaacggtagtcaggccgtgggacgctcctccttctactgcctggaatactttccttcgcagatgctgagaaccggcaacaacttccagtttacttacaccttcgaggacgtgcctttccacagcagctacgcccacagccagagcttggaccggctgatgaatcctctgattgaccagtacctgtactacttgtctcggattcaaacaacaggaggcacggcaaatacgcagactctgggcttcagccaaggtgggcctaatacaatggccaatcaggcaaagaactggctgccaggaccctgttaccgccaacaacgcgtctcaacgacaaccgggcaaaacaacaatagcaactttgcctggactgctgggaccaaataccatctgaatggaagaaattcattggctaatcctggcatcgctatggcaacacacaaagacgacgaggagcgtttttttcccagtaacgggatcctgatttttggcaaacaaaatgctgccagagacaatgcggattacagcgatgtcatgcccaccagcgaggaagaaatcaaaaccactaaccctgtggccacagaggaatacggtatcgtggcagataacttgcagcagcaaaacacggctcctcaaattggaactgtcaacagccagggggccttacccggtatggtctggcagaaccgggacgtgtacctgcagggtcccatctgggccaagattcctcacacggacggcaacttccacccgtctccgctgatgggcggctttggcctgaaacatcctccgcctcagatcctgatcaagaacacgcctgtacctgcggatcctccgaccaccttcaaccagtcaaagctgaactctttcatcacgcaatacagcaccggacaggtcagcgtggaaattgaatgggagctgcagaaggaaaacagcaagcgctggaaccccgagatccagtacacctccaactactacaaatctacaagtgtggactttgctgttaatacagaaggcgtgtactctgaaccccgccccattggcacccgttacctcacccgtaatctgtaa

SEQ ID NO: 3966 - DNA, 2217 bp, Artificial Sequence
  Description of Artificial Sequence: Synthetic polynucleotide
atggctgccgatggttatcttccagattggctcgaggacaacctctctgagggcattcgcgagtggtgggcgctgaaacctggagccccgaagcccaaagccaaccagcaaaagcaggacgacggccggggtctggtgcttcctggctacaagtacctcggacccttcaacggactcgacaagggggagcccgtcaacgcggcggacgcggcggccctcgagcacgacaaggcctacgaccagcagctgcaggcgggtgacaatccgtacctgcggtataaccacgccgacgccgagtttcaggagcgtctgcaagaagatacgtcttttgggggcaacctcgggcgagcagtcttccaggccaagaagcgggttctcgaacctctcggtctggttgaggaaggcgctaagacggctcctggaaagaagagaccggtagagccatcaccccagcgttctccagactcctctacgggcatcggcaagaagggccaacagcccgccagaaaaagactcaattttggtcagactggcgactcagagtcagttccagaccctcaacctctcggagaacctccagcagcgccctctggtgtgggacctaatacaatggctgcaggcggtggcgcaccaatggcagacaataacgaaggcgccgacggagtgggtagttcctcgggaaattggcattgcgattccacatggctgggcgacagagtcatcaccaccagcacccgaacctgggccctgcccacctacaacaaccacctctacaagcaaatctccaacgggacatcgggaggagccaccaacgacaacacctacttcggctacagcaccccctgggggtattttgactttaacagattccactgccacttttcaccacgtgactggcggcgactcatcaacaacaactggggattccggcccaagagactcagcttcaagctcttcaacatccaggtcaaggaggtcacgcagaatgaaggcaccaagaccatcgccaataacctcaccagcaccatccaggtgtttacggactcggagtaccagctgccgtacgttctcggctctgcccaccagggctgcctgcctccgttcccggcggacgtgttcacgattccccagtacggctacctaacactcaacaacggtagtcaggccgtgggacgctcctccttctactgcctggaatactttccttcgcagatgctgagaaccggcaacaacttccagtttacttacaccttcgaggacgtgcctttccacagcagctacgcccacagccagagcttggaccggctgatgaatcctctgattgaccagtacctgtactacttgtctcggattcaaacaacaggaggcacggcaaatacgcagactctgggcttcagccaaggtgggcctaatacaatggccaatcaggcaaagaactggctgccaggaccctgttaccgccaacaacgcgtctcaacgacaaccgggcaaaacaacaatagcaactttgcctggactgctgggaccaaataccatctgaatggaagaaattcattggctaatcctggcatcgctatggcaacacacaaagacgacgaggagcgtttttttcccagtaacgggatcctgatttttggcaaacaaaatgctgccagagacaatgcggattacagcgatgtcatgcccaccagcgaggaagaaatcaaaaccactaaccctgtggccacagaggaatacggtatcgtggcagataacttgcagcagcaaaacacggctcctcaaattggaactgtcaacagccagggggccttacccggtatggtctggcagaaccgggacgtgtacctgcagggtcccatctgggccaagattcctcacacggacggcaacttccacccgtctccgctgatgggcggctttggcctgaaacatcctccgcctcagatcctgatcaagaacacgcctgtacctgcggatcctccgaccaccttcaaccagtcaaagctgaactctttcatcacgcaatacagcaccggacaggtcagcgtggaaattgaatgggagctgcagaaggaaaacagcaagcgctggaaccccgagatccagtacacctccaactactacaaatctacaagtgtggactttgctgttaatacagaaggcgtgtactctgaaccccgccccattggcacccgttacctcacccgtaatctgtaa

SEQ ID NO: 3967 - DNA, 2217 bp, Artificial Sequence
  Description of Artificial Sequence: Synthetic polynucleotide
atggctgccgatggttatcttccagattggctcgaggacaacctctctgagggcattcgcgagtggtgggcgctgaaacctggagccccgaagcccaaagccaaccagcaaaagcaggacgacggccggggtctggtgcttcctggctacaagtacctcggacccttcaacggactcgacaagggggagcccgtcaacgcggcggacgcagcggccctcgagcacgacaaggcctacgaccagcagctgcaggcgggtgacaatccgtacctgcggtataaccacgccgacgccgagtttcaggagcgtctgcaagaagatacgtcttttgggggcaacctcgggcgagcagtcttccaggccaagaagcgggttctcgaacctctcggtctggttgaggaaggcgctaagacggctcctggaaagaagagaccggtagagccatcaccccagcgttctccagactcctctacgggcatcggcaagaaaggccaacagcccgccagaaaaagactcaattttggtcagactggcgactcagagtcagttccagaccctcaacctctcggagaacctccagcagcgccctctggtgtgggacctaatacaatggctgcaggcggtggcgcaccaatggcagacaataacgaaggcgccgacggagtgggtagttcctcgggaaattggcattgcgattccacatggctgggcgacagagtcatcaccaccagcacccgaacctgggccctgcccacctacaacaaccacctctacaagcaaatctccaacgggacatcgggaggagccaccaacgacaacacctacttcggctacagcaccccctgggggtattttgactttaacagattccactgccacttttcaccacgtgactggcagcgactcatcaacaacaactggggattccggcccaagagactcagcttcaagctcttcaacatccaggtcaaggaggtcacgcagaatgaaggcaccaagaccatcgccaataacctcaccagcaccatccaggtgtttacggactcggagtaccagctgccgtacgttctcggctctgcccaccagggctgcctgcctccgttcccggcggacgtgttcatgattccccagtacggctacctaacactcaacaacggtagtcaggccgtgggacgctcctccttctactgcctggaatactttccttcgcagatgctgagaaccggcaacaacttccagtttacttacaccttcgaggacgtgcctttccacagcagctacgcccacagccagagcttggaccggctgatgaatcctctgattgaccagtacctgtactacttgtctcggactcaaacaacaggaggcacggcaagtacgcagactctgggcttcagccaaggtgggcctaatacaatggccaatcaggcaaagaactggctgccaggaccctgttaccgccaacaacgcgtctcaacgacaaccgggcaaaacaacaatagcaactttgcctggactgctgggaccaaataccatctgaatggaagaaattcattggctaatcctggcatcgctatggcaacacacaaagacgacgaggagcgtttttttcccagtaacgggatcctgatttttggcaaacaaaatgctgccagagacaatgcggattacagcgatgtcatgctcaccagcgaggaagaaatcaaaaccactaaccctgtggctacagaggaatacggtatcgtggcagataacttgcagcagcaaaacacggctcctcaaattggaactgtcaacagccagggggccttacccggtatggtctggcagaaccgggacgtgtacctgcagggtcccatctgggccaagattcctcacacggacggcaacttccacccgtctccgctgatgggcggctttggcctgaaacatcctccgcctcagatcctgatcaagaacacgcctgtacctgcggatcctccgaccaccttcaaccagtcaaagctgaactctttcatcacgcaatacagcaccggacaggtcagcgtggaaattgaatgggagctgcagaaggaaaacagcaagcgctggaaccccgagatccagtacacctccaactactacaaatctacaagtgtggactttgctgttaatacagaaggcgtgtactctgaaccccgccccattggcacccgttacctcacccgtaatctgtaa

SEQ ID NO: 3968 - DNA, 2217 bp, Artificial Sequence
  Description of Artificial Sequence: Synthetic polynucleotide
atggctgccgatggttatcttccagattggctcgaggacaacctctctgagggcattcgcgagtggtgggcgctgaaacctggagccccgaagcccaaagccaaccagcaaaagcaggacgacggccggggtctggtgcttcctggctacaagtacctcggacccttcaacggactcgacaagggggagcccgtcaacgcggcggacgcagcggccctcgagcacgacaaggcctacgaccagcagctgcaggcgggtgacaatccgtacctgcggtataaccacgccgacgccgagtttcaggagcgtctgcaagaagatacgtcttttgggggcaacctcgggcgagcagtcttccaggccaagaagcgggttctcgaacctctcggtctggttgaggagggcgctaagacggctcctggaaagaagagaccggtagagccatcaccccagcgttctccagactcctctacgggcatcggcaagaaaggccaacagcccgccagaaaaagactcaattttggtcagactggcgactcagagtcagttccagaccctcaacctctcggagaacctccagcagcgccctctggtgtgggacctaatacaatggctgcaggcggtggcgcaccaatggcagacaataacgaaggcgccgacggagtgggtagttcctcgggaaattggcattgcgattccacatggctgggcgacagagtcatcaccaccagcacccgaacctgggccctgcccacctacaacaaccacctctacaagcaaatctccaacgggacatcgggaggagccaccaacgacaacacctacttcggctacagcaccccctgggggtattttgactttaacagattccactgccacttttcaccacgtgactggcagcgactcatcaacaacaactggggattccggcccaagagactcagcttcaagctcttcaacatccaggtcaaggaggtcacgcagaatgaaggcaccaagaccatcgccaataacctcaccagcaccatccaggtgtttacggactcggagtaccagctgccgtacgttctcggctctgcccaccagggctgcctgcctccgttcccggcggacgtgttcatgattccccagtacggctacctaacactcaacaacggtagtcaggccgtgggacgctcctccttctactgcctggaatactttccttcgcagatgctgagaaccggcaacaacttccagtttacttacaccttcgaggacgtgcctttccacagcagctacgcccacagccagagcttggaccggctgatgaatcctctgattgaccagtacctgtactacttgtctcggactcaaacaacaggaggcacggcaaatacgcagactctgggcttcagccaaggtgggcctaatacaatggccaatcaggcaaagaactggctgccaggaccctgttaccgccaacaacgcgtctcaacgacaaccgggcaaaacaacaatagcaactttgcctggactgctgggaccaaataccatctgaatggaagaaattcattggctaatcctggcatcgctatggcaacacacaaagacgacgaggagcgtttttttcccagtaacgggatcctgatttttggcaaacaaaatgctgccagagacaatgcggattacagcgatgtcatgctcaccagcgaggaagaaatcaaaaccactaaccctgtggctacagaggaatacggtatcgtggcagataacttgcagcagcaaaacacggctcctcaaattggaactgtcaacagccagggggccttacccggtatggtctggcagaaccgggacgtgtacctgcagggtcccatctgggccaagattcctcacacggacggcaacttccacccgtctccgctgatgggcggctttggcctgaaacatcctccgcctcagatcctgatcaagaacacgcctgtacctgcggatcctccgaccaccttcaaccagtcaaagctgaactctttcatcacgcaatacagcaccggacaggtcagcgtggaaattgaatgggagctgcagaaggaaaacagcaagcgctggaaccccgagatccagtacacctccaactactacaaatctacaagtgtggactttgctgttaatacagaaggcgtgtactctgaaccccgccccattggcacccgttacctcacccgtaatctgtaa

SEQ ID NO: 3969 - DNA, 2217 bp, Artificial Sequence
  Description of Artificial Sequence: Synthetic polynucleotide
atggctgccgatggttatcttccagattggctcgaggacaacctctctgagggcattcgcgagtggtgggcgctgaaacctggagccccgaagcccaaagccaaccagcaaaagcaggacgacggccggggtcaggtgcttcctggctacaagtacctcggacccttcaacggactcgacaagggggagcccgtcaacgcggcggacgcagcggccctcgagcacgacaaggcctacgaccagcagctgcaggcgggtgacaatccgtacctgcggtataaccacgccgacgccgagtttcaggagcgtctgcaagaagatacgtcttttgggggcaacctcgggcgagcagtcttccaggccaagaagcgggttctcgaacctctcggtctggttgaggaaggcgctaagacggctcctggaaagaagagaccggtagagccatcaccccagcgttctccagactcctctacgggcatcggcaagaaaggccaacagcccgccagaaaaagactcaattttggtcagactggcgactcagagtcagttccagaccctcaacctctcggagaacctccagcagcgccctctggtgtgggacctaatacaatggctgcaggcggtggcgcaccaatggcagacaataacgaaggcgccgacggagtgggtagttcctcgggaaattggcattgcgattccacatggctgggcgacagagtcatcaccaccagcacccgaacctgggccctgcccacctacaacaaccacctctacaagcaaatctccaacgggacatcgggaggagccaccaacgacaacacctacttcggctacagcaccccctgggggtattttgactttaacagattccactgccacttttcaccacgtgactggcagcgactcatcaacaacaactggggattccggcccaagagactcagcttcaagctcttcaacatccaggtcaaggaggtcacgcagaatgaaggcaccaagaccatcgccaataacctcaccagcaccatccaggtgtttacggactcggagtaccagctgccgtacgttctcggctctgcccaccagggctgcctgcctccgttcccggcggacgtgttcatgattccccagtacggctacctaacactcaacaacggtagtcaggccgtgggacgctcctccttctactgcctggaatactttccttcgcagatgctgagaaccggcaacaacttccagtttacttacaccttcgaggacgtgcctttccacagcagctacgcccacagccagagcttggaccggctgatgaatcctctgattgaccagtacctgtactacttgtctcggactcaaacaacaggaggcacggcaaatacgcagactctgggcttcagccaaggtgggcctaatacaatggccaatcaggcaaagaactggctgccaggaccctgttaccgccaacaacgcgtctcaacgacaaccgggcaaaacaacaatagcaactttgcctggactgctgggaccaaataccatctgaatggaagaaattcattggctaatcctggcatcgctatggcaacacacaaagacgacgaggagcgtttttttcccagtaacgggatcctgatttttggcaaacaaaatgctgccagagacaatgcggattacagcgatgtcatgctcaccagcgaggaagaaatcaaaaccactaaccctgtggctacagaggaatacggtatcgtggcagataacttgcagcagcaaaacacggctcctcaaattggaactgtcaacagccagggggccttacccggtatggtctggcagaaccgggacgtgtacctgcagggtcccgtctgggccaagattcctcacacggacggcaacttccacccgtctccgctgatgggcggctttggcctgaaacatcctccgcctcagatcctgatcaagaacacgcctgtacctgcggatcctccgaccaccttcaaccagtcaaagctgaactctttcatcacgcaatacagcaccggacaggtcagcgtggaaattgaatgggagctgcagaaggaaaacagcaagcgctggaaccccgagatccagtacacctccaactactacaaatctacaagtgtggactttgctgttaatacagaaggcgtgtactctgaaccccgccccattggcacccgttacctcacccgtaatctgtaa

SEQ ID NO: 3970 - DNA, 2217 bp, Artificial Sequence
  Description of Artificial Sequence: Synthetic polynucleotide
atggctgccgatggttatcttccagattggctcgaggacaacctctctgagggcattcgcgagtggtgggcgctgaaacctggagccccgaagcccaaagccaaccagcaaaagcaggacgacggccggggtctggtgcttcctggctacaagtacctcggacccttcaacggactcgacaagggggagcccgtcaacgcggcggacgcagcggccctcgagcacgacaaggcctacgaccagcagctgcaggcgggtgacaatccgtacctgcggtataaccacgccgacgccgagtttcaggagcgtctgcaagaagatacgtcttttgggggcaacctcgggcgagcagtcttccaggccaagaagcgggttctcgaacctctcggtctggttgaggaaggcgctaagacggctcctggaaagaagagaccggtagagccatcaccccagcgttctccagactcctctacgggcatcggcaagaaaggccaacagcccgccagaaaaagactcaattttggtcagactggcgactcagagtcagttccagaccctcaacctctcggagaacctccagcagcgccctctggtgtgggacctaatacaatggctgcaggcggtggcgcaccaatggcagacaataacgaaggcgccgacggagtgggtagttcctcgggaaattggcattgcgattccacatggctgggcgacagagtcatcaccaccagcacccgaacctgggccctgcccacctacaacaaccacctctacaagcaaatctccaacgggacatcgggaggagccaccaacgacaacacctacttcggctacagcaccccctgggggtattttgactttaacagattccactgccacttttcaccacgtgactggcagcgactcatcaacagcaactggggattccggcccaagagactcagcttcaagctcttcaacatccaggtcaaggaggtcacgcagaatgaaggcaccaagaccatcgccaataacctcaccagcaccatccaggtgtttacggactcggagtaccagctgccgtacgttctcggctctgcccaccagggctgcctgcctccgttcccggcggacgtgttcatgattccccagtacggctacctaacactcaacaacggtagtcaggccgtgggacgctcctccttctactgcctggaatactttccttcgcagatgctgagaaccggcaacaacttccagtttacttacaccttcgaggacgtgcctttccacagcagctacgcccacagccagagcttggaccggctgatgaatcctctgattgaccagtacctgtactacttgtctcggactcaaacaacaggaggcacggcaaatacgcagactctgggcttcagccaaggtgggcctaatacaatggccaatcaggcaaagaactggctgccaggaccctgttaccgccaacaacgcgtctcaacgacaaccgggcaaaacaacaatagcaactttgcctggactgctgggaccaaataccatctgaatggaagaaattcattggctaatcctggcatcgctatggcaacacacaaagacgacgaggagcgtttttttcccagtaacgggatcctgatttttggcaaacaaaatgctgccagagacaatgcggattacagcgatgtcatgctcaccagcgaggaagaaatcaaaaccactaaccctgtggctacagaggaatacggtatcgtggcagataacttgcagcagcaaaacacggctcctcaaattggaactgtcaacagccagggggccttacccggtatggtctggcagaaccgggacgtgtacctgcagggtcccatctgggccaagattcctcacacggacggcaacttccacccgtctccgctgatgggcggctttggcctgaaacatcctccgcctcagatcctgatcaagaacacgcctgtacctgcggatcctccgaccaccttcaaccagtcaaagctgaactctttcatcacgcaatacagcaccggacaggtcagcgtggaaattgaatgggagctgcagaaggaaaacagcaagcgctggaaccccgagatccagtacacctccaactactacaaatctacaagtgtggactttgctgttaatacagaaggcgtgtactctgaaccccgccccattggcacccgttacctcacccgtaatctgtaa

SEQ ID NO: 3971 - DNA, 2217 bp, Artificial Sequence
  Description of Artificial Sequence: Synthetic polynucleotide
atggctgccgatggttatcttccagattggctcgaggacaacctctctgagggcattcgcgagtggtgggcgctgaaacctggagccccgaagcccaaagccaaccagcaaaagcaggacgacggccggggtctggtgcttcctggctacaagtacctcggacccttcaacggactcgacaagggggagcccgtcaacgcggcggacgcagcggccctcgagcacgacaaggcctacgaccagcagctgcaggcgggtgacaatccgtacctgcggtataaccacgccgacgccgagtttcaggagcgtctgcaagaagatacgtcttttgggggcaacctcgggcgagcagtcttccaggccaagaagcgggttctcgaacctctcggtctggttgaggagggcgctaagacggctcctggaaagaagagaccggtagagccatcaccccagcgttctccagactcctctacgggcatcggcaagaaaggccaacagcccgccagaaaaagactcaattttggtcagactggcgactcagagtcagttccagaccctcaacctctcggagaacctccagcagcgccctctggtgtgggacctaatacaatggctgcaggcggtggcgcaccaatggcagacaataacgaaggcgccgacggagtgggtagttcctcgggaaattggcattgcgattccacatggctgggcgacagagtcatcaccaccagcacccgaacctgggccctgcccacctacaacaaccacctctacaagcaaatctccaacgggacatcgggaggagccaccaacgacaacacctacttcggctacagcaccccctgggggtattttgactttaacagattccactgccacttttcaccacgtgactggcagcgactcatcaacaacaactggggattccggcccaagagactcagcttcaagctcttcaacatccaggtcaaggaggtcacgcagaatgaaggcaccaagaccatcgccaataacctcaccagcaccatccaggtgtttacggactcggagtaccagctgccgtacgttctcggctctgcccaccagggctgcctgcctccgttcccggcggacgtgttcacgattccccagtacggctacctaacactcaacaacggtagtcaggccgtgggacgctcctccttctactgcctggaatactttccttcgcagatgctgagaaccggcaacaacttccagtttacttacaccttcgaggacgtgcctttccacagcagctacgcccacagccagagcttggaccggctgatgaatcctctgattgaccagtacctgtactacttgtctcggactcaaacaacaggaggcacggcaaatacgcagactctgggcttcagccaaggtgggcctaatacaatggccaatcaggcaaagaactggctgccaggaccctgttaccgccaacaacgcgtctcaacgacaaccgggcaaaacaacaatagcaactttgcctggactgctgggaccaaataccatctgaatggaagaaattcattggctaatcctggcatcgctatggcaacacacaaagacgacgaggagcgtttttttcccagtaacgggatcctgatttttggcaaacaaaatgctgccagagacaatgcggattacagcgatgtcatgctcaccagcgaggaagaaatcaaaaccactaaccctgtggctacagaggaatacggtatcgtggcagataacttgcagcagcaaaacacggctcctcaaattggaactgtcaacagccagggggccttacccggtatggtctggcagaaccgggacgtgtacctgcagggtcccatctgggccaagattcctcacacggacggcaacttccacccgtctccgctgatgggcggctttggcctgaaacatcctccgcctcagatcctgatcaagaacacgcctgtacctgcggatcctccgaccaccttcaaccagtcaaagctgaactctttcatcacgcaatacagcaccggacaggtcagcgtggaaattgaatgggagctgcagaaggaaaacagcaagcgctggaaccccgagatccagtacacctccaactactacaaatctacaagtgtggactttgctgttaatacagaaggcgtgtactctgaaccccgccccattggcacccgttacctcacccgtaatctgtaa

SEQ ID NO: 3972 - DNA, 2217 bp, Artificial Sequence
  Description of Artificial Sequence: Synthetic polynucleotide
atggctgccgatggttatcttccagattggctcgaggacaacctctctgagggcattcgcgagtggtgggcgctgaaacctggagccccgaagcccaaagccaaccagcaaaagcaggacgacggccggggtctggtgcttcctggctacaagtacctcggacccttcaacggactcgacaagggggagcccgtcaacgcggcggacgcagcggccctcgagcacgacaaggcctacgaccagcagctgcaggcgggtgacaatccgtacctgcggtataaccacgccgacgccgagtttcaggagcgtctgcaagaagatacgtcttttgggggcaacctcgggcgagcagtcttccaggccaagaagcgggttctcgaacctctcggtctggttgaggaaggcgctaagacggctcctggaaagaagagaccggtagagccatcaccccagcgttctccagactcctctacgggcatcggcaagaaaggccaacagcccgccagaaaaagactcaattttggtcagactggcgactcagagtcagttccagaccctcaacctctcggagaacctccagcagcgccctctggtgtgggacctaatacaatggctgcaggcggtggcgcaccaatggcagacaataacgaaggcgccgacggagtgggtagttcctcgggaaattggcattgcgattccacatggctgggcgacagagtcatcaccaccagcacccgaacctgggccctgcccacctacaacaaccacctctacaagcaaatctccaacgggacatcgggaggagccaccaacgacaacacctacttcggctacagcaccccctgggggtattttgactttaacagattccactgccacttttcaccacgtgactggcagcgactcatcgacaacaactggggattccggcccaagagactcagcttcaagctcttcaacatccaggtcaaggaggtcacgcagaatgaaggcaccaagaccatcgccaataacctcaccagcaccatccaggtgtttacggactcggagtaccagctgccgtacgttctcggctctgcccaccagggctgcctgcctccgttcccggcggacgtgttcatgattccccagtacggctacctaacactcaacaacggtagtcaggccgtgggacgctcctccttctactgcctggaatactttccttcgcagatgctgagaaccggcaacaacttccagtttacttacaccttcgaggacgtgcctttccacagcagctacgcccacagccagagcttggaccggctgatgaatcctctgattgaccagtacctgtactacttgtctcggactcaaacaacaggaggcacggcaaatacgcagactctgggcttcagccaaggtgggcctaatacaatggccaatcaggcaaagaactggctgccaggaccctgttaccgccaacaacgcgtctcaacgacaaccgggcaaaacaacaatagcaactttgcctggactgctgggaccaaataccatctgaatggaagaaattcattggctaatcctggcatcgctatggcaacacacaaagacgacgaggagcgtttttttcccagtaacgggatcctgatttttggcaaacaaaatgctgccagagacaatgcggattacagcgatgtcatgctcaccagcgaggaagaaatcaaaaccactaaccctgtggctacagaggaatacggtatcgtggcagataacttgcagcagcaaaacacggctcctcaaattggaactgtcaacagccagggggccttacccggtatggtctggcagaaccgggacgtgtacctgcagggtcccatctgggccaagattcctcacacggacggcaacttccacccgtctccgctgatgggcggctttggcctgaaacatcctccgcctcagatcctgatcaagaacacgcctgtacctgcggatcctccgaccaccttcaaccagtcaaagctgaactctttcatcacgcaatacagcaccggacaggtcagcgtggaaattgaatgggagctgcagaaggaaaacagcaagcgctggaaccccgagatccagtacacctccaactactacaaatctacaagtgtggactttgctgttaatacagaaggcgtgtactctgaaccccgccccattggcacccgttacctcacccgtaatctgtaa

SEQ ID NO: 3973 - DNA, 2217 bp, Artificial Sequence
  Description of Artificial Sequence: Synthetic polynucleotide
atggctgccgatggttatcttccagattggctcgaggacaacctctctgagggcattcgcgagtggtgggcgctgaaacctggagccccgaagcccaaagccaaccagcaaaagcaggacgacggccggggtctggtgcttcctggctacaagtacctcggacccttcaacggactcgacaagggggagcccgtcaacgcggcggacgcagcggccctcgagcacgacaaggcctacgaccagcagctgcaggcgggtgacaatccgtacctgcggtataaccacgccgacgccgagtttcaggagcgtctgcaagaagatacgtcttttgggggcaacctcgggcgagcagtcttccaggccaagaagcgggttctcgaacctctcggtctggttgaggaaggcgctaagacggctcctggaaagaagagaccggtagagccatcaccccagcgttctccagactcctctacgggcatcggcaagaaaggccaacagcccgccagaaaaagactcaattttggtcagactggcgactcagagtcagttccagaccctcaacctctcggagaacctccagcagcgccctctggtgtgggacctaatacaatggctgcaggcggtggcgcaccaatggcagacaataacgaaggcgccgacggagtgggtagttcctcgggaaattggcattgcgattccacatggctgggcgacagagtcatcaccaccagcacccgaacctgggccctgcccgcctacaacaaccacctctacaagcaaatctccaacgggacatcgggaggagccaccaacgacaacacctacttcggctacagcaccccctgggggtattttgactttaacagattccactgccacttttcaccacgtgactggcagcgactcatcaacaacaactggggattccggcccaagagactcagcttcaagctcttcaacatccaggtcaaggaggtcacgcagaatgaaggcaccaagaccatcgccaataacctcaccagcaccatccaggtgtttacggactcggagtaccagctgccgtacgttctcggctctgcccaccagggctgcctgcctccgttcccggcggacgtgttcacgattccccagtacggctacctaacactcaacaacggtagtcaggccgtgggacgctcctccttctactgcctggaatactttccttcgcagatgctgagaaccggcaacaacttccagtttacttacaccttcgaggacgtgcctttccacagcagctacgcccacagccagagcttggaccggctgatgaatcctctgattgaccagtacctgtactacttgtctcggactcaaacaacaggaggcacggcaaatacgcagactctgggcttcagccaaggtgggcctaatacaatggccaatcaggcaaagaactggctgccaggaccctgttaccgccaacaacgcgtctcaacgacaaccgggcaaaacaacaatagcaactttgcctggactgctgggaccaaataccatctgaatggaagaaattcattggctaatcctggcatcgctatggcaacacacaaagacgacgaggagcgtttttttcccagtaacgggatcctgatttttggcaaacaaaatgctgccagagacaatgcggattacagcgatgtcatgctcaccagcgaggaagaaatcaaaaccactaaccctgtggctacagaggaatacggtatcgtggcagataacttgcagcagcaaaacacggctcctcaaattggaactgtcaacagccagggggccttacccggtatggtctggcagaaccgggacgtgtacctgcagggtcccatctgggccaagattccacacacggacggcaacttccacccgtctccgctgatgggcggctttggcctgaaacatcctccgcctcagatcctgatcaagaacacgcctgtacctgcggatcctccgaccaccttcaaccagtcaaagctgaactctttcatcacgcaatacagcaccggacaggtcagcgtggaaattgaatgggagctgcagaaggaaaacagcaagcgctggaaccccgagatccagtacacctccaactactacaaatctacaaatgtggactttgctgttaatacagaaggcgtgtactctgaaccccgccccattggcacccgttacctcacccgtaatctgtaa

SEQ ID NO: 3974 - DNA, 2217 bp, Artificial Sequence
  Description of Artificial Sequence: Synthetic polynucleotide
atggctgccgatggttatcttccagattggctcgaggacaacctctctgagggcattcgcgagtggtgggcgctgaaacctggagccccgaagcccaaagccaaccagcaaaagcaggacgacggccggggtctggtgcttcctggctacaagtacctcggacccttcaacggactcgacaagggggagcccgtcaacgcggcggacgcagcggccctcgagcacgacaaggcctacgaccagcagctgcaggcgggtgacaatccgtacctgcggtataaccacgccgacgccgagtttcaggagcgtctgcaagaagatacgtcttttgggggcaacctcgggcgagcagtcttccaggccaagaagcgggttctcgaacctctcggtctggttgaggaaggcgctaagacggctcctggaaagaagagaccggtagagccatcaccccagcgttctccagactcctctacgggcatcggcaagaaaggccaacagcccgccagaaaaagactcaattttggtcagactggcgactcagagtcagttccagaccctcaacctctcggagaacctccagcagcgccctctggtgtgggacctaatacaatggctgcaggcggtggcgcaccaatggcagacaataacgaaggcgccgacggagtgggtagttcctcgggaaattggcattgcgattccacatggctgggcgacagagtcatcaccaccagcacccgaacctgggccctgcccacctacaacaaccacctctacaagcaaatctccaacgggacatcgggaggagccaccaacgacaacacctacttcggctacagcaccccctgggggtattttgactttaacagattccactgccacttttcaccacgtgactggcagcgactcatcaacaacaactggggattccggcccaagagactcagcttcaagctcttcaacatccaggtcaaggaggtcacgcagaatgaaggcaccaagaccatcgccaataacctcaccagcaccatccaggtgtttacggactcggagtaccagctgccgtacgttctcggctctgcccaccagggctgcctgcctccgttcccggcggacgtgttcatgattccccagtacggctacctaacactcaacgacggtagtcaggccgtgggacgctcctccttctactgcctggaatactttccttcgcagatgctgagaaccggcaacaacttccagtttacttacaccttcgaggacgtgcctttccacagcagctacgcccacagccagagcttggaccggctgatgaatcctctgattgaccagtacctgtactacttgtctcggactcaaacaacaggaggcacggcaaatacgcagactctgggcttcagccaaggtgggcctaatacaatggccaatcaggcaaagaactggctgccaggaccctgttaccgccaacaacgcgtctcaacgacaaccgggcaaaacaacaatagcaactttgcctggactgctgggaccaaataccatctgaatggaagaaattcattggctaatcctggcatcgctatggcaacacacaaagacgacgaggagcgtttttttcccagtaacgggatcctgatttttggcaaacaaaatgctgccagagacaatgcggattacagcgatgtcatgctcaccagcgaggaagaaatcaaaaccactaaccctgtggctacagaggaatacggtatcgtggcagataacttgcagcagcaaaacacggctcctcaaattggaactgtcaacagccagggggccttacccggtatggtctggcagaaccgggacgtgtacctgcagggtcccatctgggccaagattcctcacacggacggcaacttccacccgtctccgctgatgggcggctttggcctgaaacatcctccgcctcagatcctgatcaagaacacgcctgtacctgcggatcctccgaccaccttcaaccagtcaaagctgaactctttcatcacgcaatacagcaccggacaggtcagcgtggaaattgaatgggagctgcagaaggaaaacagcaagcgctggaaccccgagatccagtacacctccaactactacaaatctacaagtgtggactttgctgttaatacagaaggcgtgtactctgaaccccgccccattggcacccgttacctcacccgtaatctgtaa

SEQ ID NO: 3975 - DNA, 2217 bp, Artificial Sequence
  Description of Artificial Sequence: Synthetic polynucleotide
atggctgccgatggttatcttccagattggctcgaggacaacctctctgagggcattcgcgagtggtgggcgctgaaacctggagccccgaagcccaaagccaaccagcaaaagcaggacgacggccggggtctggtgcttcctggctacaagtacctcggacccttcaacggactcgacaagggggagcccgtcaacgcggcggacgcagcggccctcgagcacgacaaggcctacgaccagcagctgcaggcgggtgacaatccgtacctgcggtataaccacgccgacgccgagtttcaggagcgtctgcaagaagatacgtcttttgggggcaacctcgggcgagcagtcttccaggccaagaagcgggttctcgaacctctcggtctggttgaggaaggcgctaagacggctcctggaaagaagagaccggtagagccatcaccccagcgttctccagactcctctacgggcatcggcaagaaaggccaacagcccgccagaaaaagactcaattttggtcagactggcgactcagagtcagttccagaccctcaacctctcggagaacctccagcagcgccctctggtgtgggacctaatacaatggctgcaggcggtggcgcaccaatggcagacaataacgaaggcgccgacggagtgggtagttcctcgggaaattggcattgcgattccacatggctgggcgacagagtcatcaccaccagcacccgaacctgggcccagcccacctacaacaaccacctctacaagcaaatctccaacgggacatcgggaggagccaccaacgacaacacctacttcggctacagcaccccctgggggtattttgactttaacagattccactgccacttttcaccacgtgactggcagcgactcatcaacaacaactggggattccggcccaagagactcagcttcaagctcttcaacatccaggtcaaggaggtcacgcagaatgaaggcaccaagaccatcgccaataacctcaccagcaccatccaggtgtttacggactcggagtaccagctgccgtacgttctcggctctgcccaccagggctgcctgcctccgttcccggcggacgtgttcatgattccccagtacggctacctaacactcaacaacggtagtcaggccgtgggacgctcctccttctactgcctggaatactttccttcgcagatgctgagaaccggcaacaacttccagtttacttacaccttcgaggacgtgcctttccacagcagctacgcccacagccagagcttggaccggctgatgaatcctctgattgaccagtacctgtactacttgtctcggactcaaacaacaggaggcacggcaaatacgcagactctgggcttcagccaaggtgggcctaatacaatggccaatcaggcaaagaactggctgccaggaccctgttaccgccaacaacgcgtctcaacgacaaccgggcaaaacaacaatagcaactttgcctggactgctgggaccaaataccatctgaatggaagaaattcattggctaatcctggcatcgctatggcaacacacaaagacgacgaggagcgtttttttcccagtaacgggatcctgatttttggcaaacaaaatgctgccagagacaatgcggattacagcgatgtcatgctcaccagcgaggaagaaatcaaaaccactaaccctgtggctacagaggaatacggtatcgtggcagataacttgcagcagcaaaacacggctcctcaaattggaactgtcaacagccagggggccttacccggtatggtctggcagaaccgggacgtgtacctgcagggtcccatctgggccaagattcctcacacggacggcaacttccacccgtctccgctgatgggcggctttggcctgaaacatcctccgcctcagatcctgatcaagaacacgcctgtacctgcggatcctccgaccaccttcaaccagtcaaagctgaactctttcatcacgcaatacagcaccggacaggtcagcgtggaaattgaatgggagctgcagaaggaaaacagcaagcgctggaaccccgagatccagtacacctccaactactacaaatctacaagtgtggactttgctgttaatacagaaggcgtgtactctgaaccccgccccattggcacccgttacctcacccgtaatctgtaa

SEQ ID NO: 3976 - DNA, 2208 bp, Artificial Sequence
  Description of Artificial Sequence: Synthetic polynucleotide
atggctgccgatggttatcttccagattggctcgaggacactctctctgaaggaataagacagtggtggaagctcaaacctggcccaccaccgccaaagcccgcagagcggcataaggacgacagcaggggtcttgtgcttcctgggtacaagtacctcggacccttcaacggactcgacaaaggagagccggtcaacgaggcagacgccgcggccctcgagcacgacaaggcctacgaccggcagctcgacagcggagacaacccgtacctcaagtacaaccacgccgacgcggagtttcaggagcgccttaaagaagatacgtcttttgggggcaacctcggacgagcagtcttccaggcgaaaaagagggttcttgaacctctgggcctggttgaggaacctgttaagacggctccgggaaaaaagaggccggtagagcactctcctgcggagccagactcctcctcgggaaccggaaaggcgggccagcagcctgcgagaaagagattgaatttcggtcagactggagacgcagactccgtacctgacccccagcctctcggacagccaccagcagccccctctggtctgggaactaatacgatggctacaggcagtggcgcaccaatggcagacaataacgagggcgccgacggagtgggtaattcctcgggaaattggcattgcgattccacatggatgggcgacagagtcatcaccaccagcacccgcacctgggctctgcccacctacaacaaccatctgtacaagcaaatttccagccaatcaggagcatcgaacgacaaccactactttggctacagcaccccctgggggtattttgacttcaacagattccactgccacttttcgccacgtgactggcaaagactcatcaacaacaactggggattccggcccaagagactcagcttcaagctctttaacattcaagtcaaggaggtcacgcagaatgacggtacgacgacgattgccaataaccttaccagcacggttcaggtctttactgactcggagtaccagctcccgtacgtcctcggctcggcgcatcaaggatgcctcccgccgtttccagcggacgtcttcatggtcccacagtatggatacctcaccctgaacaacgggagtcaggcggtaggacgctcttccttttactgcctggagtactttccttctcagatgcttcgtactggaaacaactttaccttcagctacacctttgaagacgttcctttccacagcagctacgctcacagccaaagtctggaccgtctcatgaatcctctcatcgaccagtacctgtattacttgagcaaaacaaacgctccaagcggaaccaccacgatgtccaggcttcagttttctcaggccggagcaagtgacattcgggaccagtctagaaactggcttcctggaccctgttaccgccagcagcgagtatcaaagacagctgcggacaacaacaacagtgattactcgtggactggagctaccaagtaccacctcaatggaagagactctctggtgaacccgggcccagctatggccagccacaaggacgatgaagaaaaatattttcctcagagcggggttctcatcttcgggaaacaaggctcaaataaaactaatgtggacattgaaaaggtcatgattacagacgaagaggaaatcaggaccaccaatcccgtggctacggagcagtacggtgctgtatctaccaaccttcaaagcggcaacacacaagcagctacctcagatgtcaacacacaaggcgttcttcctggcatggtctggcaggacagagacgtgtacctgcaggggcccatctgggcaaagattccccacacggatggacactttcacccttctcctcttatgggaggatttggattgaagcaccctcccccacagattctcatcaagaataccccggtacctgcgaatccttctaccaccttcagtgcggcaaagtttgcttctttcatcacacagtactccacagggcaggtcagcgtggagatcgagtgggagctgcagaaagagaacagcaaacgctggaaccccgagattcagtatacctccaactacaacaagtctgttaatgtggactttactgtggacactaatggcgtgtattcagagcctcgccccattggcacaagatacctgactcgtaatctgtaa

SEQ ID NO: 3977 - DNA, 2208 bp, Artificial Sequence
  Description of Artificial Sequence: Synthetic polynucleotide
atggctgccgatggttatcttccagattggctcgaggacactctctctgaaggaataagacagtggtggaagctcaaacctggcccaccaccgccaaagcccgcagagcggcataaggacgacagcaggggtcttgtgcttcctgggtacaagtacctcggacccttcaacggactcgacaaaggagagccggtcaacgaggcagacgccgcggccctcgagcacgacaaggcctacgaccggcagctcgacagcggagacaacccgtacctcaagtacaaccacgccgacgcggagtttcaggagcgccttaaagaagatacgtcttttgggggcaacctcggacgagcagtcttccaggcgaaaaagagggttcttgaacctctgggcctggttgaggaacctgttaagacggctccgggaaaaaagaggccggtagagcactctcctgcggagccagactcctcctcgggaaccggaaaggcgggccagcagcctgcgagaaagagattgaatttcggtcagactggagacgcagactccgtacctgacccccagcctctcggacagccaccagcagccccctctggtctgggaactaatacgatggctacaggcagtggcgcaccaatggcagacaataacgagggcgccgacggagtgggtaattcctcgggaaattggcattgcgattccacatggatgggcgacagagtcatcaccaccagcacccgcacctgggctctgcccacctacaacaaccatctgtacaagcaaatttccagccaatcaggagcatcgaacgacaaccactactttggctacagcaccccctgggggtattttgacttcaacagattccactgccacttttcgccacgtgactggcaaagactcatcaacaacaactggggattccggcccaagagactcagcttcaagctctttaacattcaagtcaaggaggtcacgcagaatgacggtacgacgacgattgccaataaccttaccagcacggttcaggtctttactgactcggagtaccagctcccgtacgtcctcggctcggcgcatcaaggatgcctcccgccgtttccagcggacgtcttcatggtcccacagtatggatacctcaccctgaacaacgggagtcaggcggtaggacgctcttccttttactgcctggagtactttccttctcagatgcttcgtactggaaacaactttaccttcagctacacctttgaagacgttcctttccacagcagctacgctcacagccaaagtctggaccgtctcatgaatcctctcatcgaccagtacctgtattacttgagcaaaacaaacgctccaagcggaaccaccacgatgtccaggcttcagttttctcaggccggagcaagtgacattcgggaccagtctagaaactggcttcctggaccctgttaccgccagcagcgagtatcaaagacagctgcggacaacaacaacagtgattactcgtggactggagctaccaagtaccacctcaatggaagagactctctggtgaacccgggcccagctatggccagccacaaggacgatgaagaaaaaatatttcctcagagcggggttctcatcttcgggaaacaaggctcaaataaaactaatgtggacattgaaaaggtcatgattacagacgaagaggaaatcaggaccaccaatcccgtggctacggagcagtacggtgctgtatctaccaaccttcaaagcggcaacacacaagcagctacctcagatgtcaacacacaaggcgttcttcctggcatggtctggcaggacagagacgtgtacctgcaggggcccatctgggcaaagattccccacacggatggacactttcacccttctcctcttatgggaggatttggattgaagcaccctcccccacagattctcatcaagaataccccggtacctgcgaatccttctaccaccttcagtgcggcaaagtttgcttctttcatcacacagtactccacagggcaggtcagcgtggagatcgagtgggagctgcagaaagagaacagcaaacgctggaaccccgagattcagtatacctccaactacaacaagtctgttaatgtggactttactgtggacactaatggcgtgtattcagagcctcgccccattggcacaagatacctgactcgtaatctgtaa

SEQ ID NO: 3978 - DNA, 2208 bp, Artificial Sequence
  Description of Artificial Sequence: Synthetic polynucleotide
atggctgccgatggttatcttccagattggctcgaggacactctctctgaaggaataagacagtggtggaagctcaaacctggcccaccaccgccaaagcccgcagagcggcataaggacgacagcaggggtcttgtgcttcctgggtacaagtacctcggacccttcaacggactcgacaaaggagagccggtcaacgaggcagacgccgcggccctcgagcacgacaaggcctacgaccggcagctcgacagcggagacaacccgtacctcaagtacaaccacgccgacgcggagtttcaggagcgccttaaagaagatacgtcttttgggggcaacctcggacgagcagtcttccaggcgaaaaagagggttcttgaacctctgggcctggttgaggaacctgttaagacggctccgggaaaaaagaggccggtagagcactctcctgcggagccagactcctcctcgggaaccggaaaggcgggccagcagcctgcgagaaagagattgaatttcggtcagactggagacgcagactccgtacctgacccccagcctctcggacagccaccagcagccccctctggtctgggaactaatacgatggctacaggcagtggcgcaccaatggcagacaataacgagggcgccgacggagtgggtaattcctcgggaaattggcattgcgattccacatggatgggcgacagagtcatcaccaccagcacccgcacctgggctctgcccacctacaacaaccatctgtacaagcaaatttccagccaatcaggagcatcgaacgacaaccactactttggctacagcaccccctgggggtattttgacttcaacagattccactgccacttttcgccacgtgactggcaaagactcatcaacaacaactggggattccggcccaagagactcagcttcaagctctttaacattcaagtcaaggaggtcacgcagaatgacggtacgacgacgattgccaataaccttaccagcacggttcaggtctttactgactcggagtaccagctcccgtacgccctcggctcggcgcatcaaggatgcctcccgccgtttccagcggacgtcttcatggtcccacagtatggatacctcaccctgaacaacgggagtcaggcggtaggacgctcttccttttactgcctggagtactttccttctcagatgcttcgtactggaaacaactttaccttcagctacacctttgaagacgttcctttccacagcagctacgctcacagccaaagtctggaccgtctcatgaatcctctcatcgaccagtacctgtattacttgagcaaaacaaacgctccaagcggaaccaccacgatgtccaggcttcagttttctcaggccggagcaagtgacattcgggaccagtctagaaactggcttcctggaccctgttaccgccagcagcgagtatcaaagacagctgcggacaacaacaacagtgattactcgtggactggagctaccaagtaccaccccaatggaagagactctctggtgaacccgggcccagctatggccagccacaaggacgatgaagaaaaatattttcctcagagcggggttctcatcttcgggaaacaaggctcaaataaaactaatgtggacattgaaaaggtcatgattacagacgaagaggaaatcaggaccaccaatcccgtggctacggagcagtacggtgctgtatctaccaaccttcaaagcggcaacacacaagcagctacctcagatgtcaacacacaaggcgttcttcctggcatggtctggcaggacagagacgtgtacctgcaggggcccatctgggcaaagattccccacacggatggacactctcacccttctcctcttatgggaggatttggattgaagcaccctcccccacagattctcatcaagaataccccggtacctgcgaatccttctaccaccttcagtgcggcaaagtttgcttctttcatcacacagtactccacagggcaggtcagcgtggagatcgagtgggagctgcagaaagagaacagcaaacgctggaaccccgagattcagtatacctccaactacaacaagtctgttaatgtggactttactgtggacactaatggcgtgtattcagagcctcgccccattggcacaagatacctgactcgtaatctgtaa

SEQ ID NO: 3979 - DNA, 2205 bp, Artificial Sequence
  Description of Artificial Sequence: Synthetic polynucleotide
atggctgccgatggttatcttccagattggctcgaggacactctctctgaaggaataagacagtggtggaagctcaaacctggcccaccaccgccaaagcccgcagagcggcataaggacgacagcaggggtcttgtgcttcctgggtacaagtacctcggacccttcaacggactcgacaaaggagagccggtcaacgaggcagacgccgcggccctcgagcacgacaaggcctacgaccggcagctcgacagcggagacaacccgtacctcaagtacaaccacgccgacgcggagtttcaggagcgccttaaagaagatacgtcttttgggggcaacctcggacgagcagtcttccaggcgaaaaagagggttcttgaacctctgggcctggttgaggaacctgttaagacggctccgggaaaaaagaggccggtagagcactctcctgcggagccagactcctcctcgggaaccggaaaggcgggccagcagcctgcgagaaagagattgaatttcggtcagactggagacgcagactccgtacctgacccccagcctctcggacagccaccagcagccccctctggtctgggaactaatacgatggctacaggcagtggcgcaccaatggcagacaataacgagggcgccgacggagtgggtaattcctcgggaaattggcattgcgattccacatggatgggcgacagagtcatcaccaccagcacccgcacctgggctctgcccacctacaacaaccatctgtacaagcaaatttccagccaatcaggagcatcgaacgacaaccactactttggctacagcaccccctgggggtattttgacttcaacagattccactgccacttttcgccacgtgactggcaaagactcatcaacaacaactggggattccggcccaagagactcagcttcaagctctttaacattcaagtcaaggaggtcacgcagaatgacggtacgacgacgattgccaataaccttaccagcacggttcaggtctttactgactcggagtaccagctcccgtacgtcctcggctcggcgcatcaaggatgcctcccgccgtttccagcggacgtcttcatggtcccacagtatggatacctcaccctgaacaacgggagtcaggcggtaggacgctcttccttttactgcctggagtactttccttctcagatgcttcgtactggaaacaactttaccttcagctacacctttgaagacgttcctttccacagcagctacgctcacagccaaagtctggaccgtctcatgaatcctctcatcgaccagtacctgtattacttgagcaaaacaaacgctccaagcggaaccaccacgatgtccaggcttcagttttctcaggccggagcaagtgacattcgggaccagtctagaaactggcttcctggaccctgttaccgccagcagcgagtatcaaagacagctgcggacaacaacagtgattactcgtggactggagctaccaagtaccacctcaatggaagagactctctggtgaacccgggcccagctatggccagccacaaggacgatgaagaaaaatattttcctcagagcggggttctcatcttcgggaaacaaggctcaaataaaactaatgtggacattgaaaaggtcatgattacagacgaagaggaaatcaggaccaccaatcccgtggctacggagcagtacggtgctgtatctaccaaccttcaaagcggcaacacacaagcagctacctcagatgtcaacacacaaggcgttcttcctggcatggtctggcaggacagagacgtgtacctgcaggggcccatctgggcaaagattccccacacggatggacactttcacccttctcctcttatgggaggatttggattgaagcaccctcccccacagattctcatcaagaataccccggtacctgcgaatccttctaccaccttcagtgcggcaaagtttgcttctttcatcacacagtactccacagggcaggtcagcgtggagatcgagtgggagctgcagaaagagaacagcaaacgctggaaccccgagattcagtatacctccaactacaacaagtctgttaatgtggactttactgtggacactaatggcgtgtattcagagcctcgccccattggcacaagatacctgactcgtaatctgtaa

SEQ ID NO: 3980 - DNA, 2208 bp, Artificial Sequence
  Description of Artificial Sequence: Synthetic polynucleotide
atggctgccgatggttatcttccagattggctcgaggacactctctctgaaggaataagacagtggtggaagctcaaacctggcccaccaccgccaaagcccgcagagcggcataaggacgacagcaggggtcttgtgcttcctgggtacaagtacctcggacccttcaacggactcgacaaaggagagccggtcaacgaggcagacgccgcggccctcgagcacgacaaggcctacgaccggcagctcgacagcggagacaacccgtacctcaagtacaaccacgccgacgcggagtttcaggagcgccttaaagaagatacgtcttttgggggcaacctcgcaagagcagtattccaggcgaaaaagagggttcttgaacctctgggcctggttgaggagcctgttaagacggctccgggaaaaaagaggccggtagagcactctcctgcggagccagattcctcctccggaactggaaagtcgggccaacagcctgcaagaaagagattgaattttggtcagactggagacgcagactccgtacctgacccccagcctctcggacagccaccagcagccccctctggtctgggaactaatacgatggcttcaggcagtggcgcaccaatggcagacaataacgagggcgccgacggagtgggtaattcctcgggaaattggcattgcgattccacatggatgggcgacagagtcatcaccaccagcacccgcacctgggctctgcccacctacaacaaccatctgtacaagcaaatttccagccagtctggagccagcaacgacaaccactactttggctacagcaccccttgggggtattttgacttcaacagattccactgccacttctccccacgtgactggcaaagactcatcaacaacaattggggattccggcccaaaagactcaacttcaagctctttaacattcaagtcaaggaggtcacgcagaatgacggtacgacgacgattgccaataaccttaccagcacggttcaggtgtttactgactcggagtaccagctcccgtacgtcctcggctcggcgcatcaaggatgcctcccgccgttcccagcagacgtcttcatggtgccacagtatggatacctcaccctgaacaacgggagtcaggcggtaggacgctcttcattttactgcctggagtactttccttctcagatgctgcgtaccggaaacaactttaccttcagctacacctttgaggacgttccttttcacagcagctacgctcacagccagagtttggaccgtctcatgaatcctctcatcgaccagtacctgtattacttgagcagaacaaacactccaagcggaaccactacgcagtccaggcttcagttttctcaagccggagcgagtgacattcgggaccagtctaggaactggcttcctggaccctgttaccgccagcagcgagtatcaaagacagctgcggacaacaacaacagtgattactcgtggactggagctaccaagtatcacctcaatggaagagactctctggtgaatccgggcacagccatggccagccacaaggacgatgaagaaaagtattttcctcagagcggggttctcatcttcggaaaacaagactcgggaaaaactaatgtggacattgaaaaggtcatgattacagacgaagaggaaatcaggaccaccaatcccgtggctacggagcagtatggttctgtatctaccaatctccagagcggcaacacacaagcagctacctcagatgtcaacacacaaggcgttcttccaggcatggtctggcaggacagagacgtgtacctgcagggacccatctgggcaaagattccacacacggacggacattttcacccttctcctcttatgggaggatttggactgaagcaccctcccccgcagattctcatcaagaataccccggtacctgcgaatccttctaccaccttcagcgcggcaaagtttgcttccttcatcacacagtactccacggggcaggtcagcgtggagatcgagtgggagctgcagaaagagaacagcaaacgctggaaccccgagatccagtatacctccaactacaacaagtctgttaatgtggactttactgtggacactaatggcgtgtattcagagcctcgccccattggcacaagatacctgactcgtaatctgtaa

SEQ ID NO: 3981 - DNA, 2208 bp, Artificial Sequence
  Description of Artificial Sequence: Synthetic polynucleotide
atggctgccgatggttatcttccagattggctcgaggacactctctctgaaggaataagacagtggtggaagctcaaacctggcccaccaccgccaaagcccgcagagcggcataaggacgacagcaggggtcttgtgcttcctgggtacaagtacctcggacccttcaacggactcgacaaaggagagccggtcaacgaggcagacgccgcggccctcgagcacgacaaggcctacgaccggcagctcgacagcggagacaacccgtacctcaagtacaaccacgccgacgcggagtttcaggagcgccttaaagaagatacgtcttttgggggcaacctcgcaagagcagtattccaggcgaaaaagagggttcttgaacctctgggcctggttgaggagcctgttaagacggctccgggaaaaaagaggccggtagagcactctcctgcggagccagattcctcctccggaactggaaagtcgggccaacagcctgcaagaaagagattgaattttggtcagactggagacgcagactccgtacctgacccccagcctctcggacagccaccagcagccccctctggtctgggaactaatacgatggcttcaggcagtggcgcaccaatggcagacaataacgagggcgccgacggagtgggtaattcctcgggaaattggcattgcgattccacatggatgggcgacagagtcatcaccaccagcacccgcacctgggctctgcccacctacaacaaccatctgtacaagcaaatttccagccagtctggagccagcaacgacaaccactactttggctacagcaccccttgggggtattttgacttcaacagattccactgccacttctccccacgtgactggcaaagactcatcaacaacaattggggattccggcccaaaagactcaacttcaagctctttaacattcaagtcaaggaggtcacgcagaatgacggtacgacgacgattgccaataaccttaccagcacggttcaggtgtttactgactcggagtaccagctcccgtacgtcctcggctcggcgcatcaaggatgcctcccgccgttcccagcagacgtcttcatggtgccacagtatggatacctcaccctgaacaacgggagtcaggcggtaggacgctcttcattttactgcctggagtactttccttctcagatgctgcgtaccggaaacaactttaccttcagctacacctttgaggacgttccttttcacagcagctacgctcacagccagagtttggaccgtctcatgaatcctctcatcgaccagtacctgtattacttgagcagaacaaacactccaagcggaaccactacgcagtccaggcttcagttttctcaagccggagcgagtgacattcgggaccagtctaggaactggcttcctggaccctgttaccgccagcagcgagtatcaaagacagctgcggacaacaacaacagtgattactcgtggactggagctaccaagtatcacctcaatggaagagactctctggtgaatccgggcacagccatggccagccacaaggacgatgaagaaaagtattttcctcagagcggggttctcatcttccggaaacaagactcgggaaaaactaatgtggacattgaaaaggtcatgattacagacgaagaggaaatcaggaccaccaatcccgtggctacggagcagtatggttctgtatctaccaatctccagagcggcaacacacaagcagctacctcagatgtcaacacacaaggcgttcttccaggcatggtctggcaggacagagacgtgtacctgcagggacccatctgggcaaagattccacacacggacggacattttcacccttctcctcttatgggaggattgggacagaagcaccctcccccgcagagtctcatcaagaataccccggtacctgcgaatccttctaccaccttcagcgcggcaaagtttgcttccttcatcacacagtactccacggggcaggtcagcgtggagatcgagtgggagctgcagaaagagaacagcaaacgctggaaccccgagatccagtatacctccaactacaacaagtctgttaatgtggactttactgtggacactaatggcgtgtattcagagcctcgccccattggcacaagatacctgactcgtaatctgtaa

SEQ ID NO: 3982 - DNA, 2208 bp, Artificial Sequence
  Description of Artificial Sequence: Synthetic polynucleotide
atggctgccgatggttatcttccagattggctcgaggacactctctctgaaggaataagacagtggtggaagctcaaacctggcccaccaccgccaaagcccgcagagcggcataaggacgacagcaggggtcttgtgcttcctgggtacaagtacctcggacccttcaacggactcgacaaaggagagccggtcaacgaggcagacgccgcggccctcgagcacgacaaggcctacgaccggcagctcgacagcggagacaacccgtacctcaagtacaaccacgccgacgcggagtttcaggagcgccttaaagaagatacgtcttttgggggcaacctcgcaagagcagtattccaggcgaaaaagagggttcttgaacctctgggcctggttgaggagcctgttaagacggctccgggaaaaaagaggccggtagagcactctcctgcggagccagattcctcctccggaactggaaagtcgggccaacagcctgcaagaaagagattgaattttggtcagactggagacgcagactccgtacctgacccccagcctctcggacagccaccagcagccccctctggtctgggaactaatacgatggcttcaggcagtggcgcaccaatggcagacaataacgagggcgccgacggagtgggtaattcctcgggaaattggcattgcgattccacatggatgggcgacagagtcatcaccaccagcacccgcacctgggctctgcccacctacaacaaccatctgtacaagcaaatttccagccagtctggagccagcaacgacaaccactactttggctacagcaccccttgggggtattttgacttcaacagattccactgccacttctccccacgtgactggcaaagactcatcaacaacaattggggattccggcccaaaagactcaacttcaagctctttaacattcaagtcaaggaggtcacgcagaatgacggtacgacgacgattgccaataaccttaccagcacggttcaggtgtttactgactcggagtaccagctcccgtacgtcctcggctcggcgcatcaaggatgcctcccgccgttcccagcagacgtcttcatggtgccacagtatggatacctcaccctgaacaacgggagtcaggcggtaggacgctcttcattttactgcctggagtactttccttctcagatgctgcgtaccggaaacaactttaccttcagctacacctttgaggacgttccttttcacagcagctacgctcacagccagagtttggaccgtctcatgaatcctctcatcgaccagtacctgtattacttgagcagaacaaacactccaagcggaaccactacgcagtccaggcttcagttttctcaagccggagcgagtgacattcgggaccagtctaggaactggcttcctggaccctgttaccgccagcagcgagtatcaaagacagctgcggacaacaacaacagtgattactcgtggactggagctaccaagtatcacctcaatggaagagactctctggtgaatccgggcacagccatggccagccacaaggacgatgaagaaaagtattttcctcagagcggggttctcatcttcggaaaacaagactcgggaaaaactaatgtggacattgaaaaggtcatgattacagacgaagaggaaatcaggaccaccaatcccgtggctacggagcagtatggttctgtatctaccaatctccagagcggcaacacacaagcagctacctcagatgtcaacacacaaggcgttcttccaggcatggtctggcaggacagagacgtgtacctgcagggacccatctgggcaaagattccacacacggacggacattttcacccttctcctcttatgggaggattgggacagaagcaccctcccccgcagattctcatcaagaataccccggtacctgcgaatccttctaccaccttcagcgcggcaaagtttgcttccttcatcacacagtactccacggggcaggtcagcgtggagatcgagtgggagctgcagaaagagaacagcaaacgctggaaccccgagatccagtatacctccaactacaacaagtctgttaatgtggactttactgtggacactaatggcgtgtattcagagcctcgccccattggcacaagatacctgactcgtaatctgtaa

SEQ ID NO: 3983 - DNA, 2208 bp, Artificial Sequence
  Description of Artificial Sequence: Synthetic polynucleotide
atggctgccgatggttatcttccagattggctcgaggacactctctctgaaggaataagacagtggtggaagctcaaacctggcccaccaccgccaaagcccgcagagcggcataaggacgacagcaggggtcttgtgcttcctgggtacaagtacctcggacccttcaacggactcgacaaaggagagccggtcaacgaggcagacgccgcggccctcgagcacgacaaggcctacgaccggcagctcgacagcggagacaacccgtacctcaagtacaaccacgccgacgcggagtttcaggagcgccttaaagaagatacgtcttttgggggcaacctcgcaagagcagtattccaggcgaaaaagagggttcttgaacctctgggcctggttgaggagcctgttaagacggctccgggaaaaaagaggccggtagagcactctcctgcggagccagattcctcctccggaactggaaagtcgggccaacagcctgcaagaaagagattgaattttggtcagactggagacgcagactccgtacctgacccccagcctctcggacagccaccagcagccccctctggtctgggaactaatacgatggcttcaggcagtggcgcaccaatggcagacaataacgagggcgccgacggagtgggtaattcctcgggaaattggcattgcgattccacatggatgggcgacagagtcatcaccaccagcacccgcacctgggctctgcccacctacaacaaccatctgtacaagcaaatttccagccagtctggagccagcaacgacaaccactactttggctacagcaccccttgggggtattttgacttcaacagattccactgccacttctccccacgtgactggcaaagactcatcaacaacaattggggattccggcccaaaagactcaacttcaagctctttaacattcaagtcaaggaggtcacgcagaatgacggtacgacgacgattgccaataaccttaccagcacggttcaggtgtttactgactcggagtaccagctcccgtacgtcctcggctcggcgcatcaaggatgcctcccgccgttcccagcagacgtcttcatggtgccacggtatggatacctcaccctgaacaacgggagtcaggcggtaggacgctcttcattttactgcctggagtactttccttctcagatgctgcgtaccggaaacaactttaccttcagctacacctttgaggacgttccttttcacagcagctacgctcacagccagagtttggaccgtctcatgaatcctctcatcgaccagtacctgtattacttgagcagaacaaacactccaagcggaaccactacgcagtccaggcttcagttttctcaagccggagcgagtgacattcgggaccagtctaggaactggcttcctggaccctgttaccgccagcagcgagtatcaaagacagctgcggacaacaacaacagtgattactcgtggactggagctaccaagtatcacctcaatggaagagactctctggtgaatccgggcacagccatggccagccacaaggacgatgaagaaaagtattttcctcagagcggggttctcatcttccggaaacaagactcgggaaaaactaatgtggacattgaaaaggtcatgattacagacgaagaggaaatcaggaccaccaatcccgtggctacggagcagtatggttctgtatctaccaatctccagagcggcaacacacaagcagctacctcagatgtcaacacacaaggcgttcttccaggcatggtctggcaggacagagacgtgtacctgcagggacccatctgggcaaagattccacacacggacggacattttcacccttctcctcttatgggaggatttggactgaagcaccctcccccgcagattctcatcaagaataccccggtacctgcgaatccttctaccaccttcagcgcggcaaagtttgcttccttcatcacacagtactccacggggcaggtcagcgtggagatcgagtgggagctgcagaaagagaacagcaaacgctggaaccccgagatccagtatacctccaactacaacaagtctgttaatgtggactttactgtggacactaatggcgtgtattcagagcctcgccccattggcacaagatacctgactcgtaatctgtaa

SEQ ID NO: 3984 - DNA, 2208 bp, Artificial Sequence
  Description of Artificial Sequence: Synthetic polynucleotide
atggctgccgatggttatcttccagattggctcgaggacactctctctgaaggaataagacagtggtggaagctcaaacctggcccaccaccgccaaagcccgcagagcggcataaggacgacagcaggggtcttgtgcttcctgggtacaagtacctcggacccttcaacggactcgacaaaggagagccggtcaacgaggcagacgccgcggccctcgagcacgacaaggcctacgaccggcagctcgacagcggagacaacccgtacctcaagtacaaccacgccgacgcggagtttcaggagcgccttaaagaagatacgtcttttgggggcaacctcgcaagagcagtattccaggcgaaaaagagggttcttgaacctctgggcctggttgaggagcctgttaagacggctccgggaaaaaagaggccggtagagcactctcctgcggagccagattcctcctccggaactggaaagtcgggccaacagcctgcaagaaagagattgaattttggtcagactggagacgcagactccgtacctgacccccagcctctcggacagccaccagcagccccctctggtctgggaactaatacgatggcttcaggcagtggcgcaccaatggcagacaataacgagggcgccgacggagtgggtaattcctcgggaaattggcattgcgattccacatggatgggcgacagagtcatcaccaccagcacccgcacctgggctctgcccacctacaacaaccatctgtacaagcaaatttccagccagtctggagccagcaacgacaaccactactttggctacagcaccccttgggggtattttgacttcaacagattccactgccacttctccccacgtgactggcaaagactcatcaacaacaattggggattccggcccaaaagactcaacttcaagctctttaacattcaagtcaaggaggtcacgcagaatgacggtacgacgacgattgccaataaccttaccagcacggttcaggtgtttactgactcggagtaccagctcccgtacgtcctcggctcggcgcatcaaggatgcctcccgccgttcccagcagacgtcttcatggtgccacagtatggatacctcaccctgaacaacgggagtcaggcggtaggacgctcttcattttactgcctggagtactttccttctcagatgctgcgtaccggaaacaactttaccttcagctacacctttgaggacgttccttttcacagcagctacgctcacagccagagtttggaccgtctcatgaatcctctcatcgaccagtacctgtattacttgagcagaacaaacactccaagcggaaccactacgcagtccaggcttcagttttctcaagccggagcgagtgacattcgggaccagtctaggaactggcttcctggaccctgttaccgccagcagcgagtatcaaagacagctgcggacaacaacaacagtgattactcgtggactggagctaccaagtatcacctcaatggaagagactctctggtgaatccgggcacagccatggccagccacaaggacgatgaagaaaagtattttcctcagagcggggttctcatcttccggaaacaagactcgggaaaaactaatgtggacattgaaaaggtcatgattacagacgaagaggaaatcaggaccaccaatcccgtggctacggagcagtatggttctgtatctaccaatctccagagcggcaacacacaagcagctacctcagatgtcaacacacaaggcgttcttccaggcatggtctggcaggacagagacgtgtacctgcagggacccatctgggcaaagattccacacacggacggacattttcacccttctcctcttatgggaggatttggactgaagcaccctcccccgcagattctcatcaagaataccccggtacctgcgaatccttctaccaccttcagcgcggcaaagtttgcttccttcatcacacagtactccacggggcaggtcagcgtggagatcgagtgggagctgcagaaagagaacagcaaacgctggaaccccgagatccagtatacctccaactacaacaagtctgttaatgtggactttactgtggacactaatggcgtgtattcagagcctcgccccattggcacaagatacctgactcgtaatctgtaa

SEQ ID NO: 3985 - DNA, 2208 bp, Artificial Sequence
  Description of Artificial Sequence: Synthetic polynucleotide
atggctgccgatggttatcttccagattggctcgaggacactctctctgaaggaataagacagtggtggaagctcaaacctggcccaccaccgccaaagcccgcagagcggcataaggacgacagcaggggtcttgtgcttcctgggtacaagtacctcggacccttcaacggactcgacaaaggagagccggtcaacgaggcagacgccgcggccctcgagcacgacaaggcctacgaccggcagctcgacagcggagacaacccgtacctcaagtacaaccacgccgacgcggagtttcaggagcgccttaaagaagatacgtcttttgggggcaacctcgcaagagcagtattccaggcgaaaaagagggttcttgaacctctgggcctggttgaggagcctgttaagacggctccgggaaaaaagaggccggtagagcactctcctgcggagccagattcctcctccggaactggaaagtcgggccaacagcctgcaagaaagagattgaattttggtcagactggagacgcagactccgtacctgacccccagcctctcggacagccaccagcagccccctctggtctgggaactaatacgatggcttcaggcagtggcgcaccaatggcagacaataacgagggcgccgacggagtgggtaattcctcgggaaattggcattgcgattccacatggatgggcgacagagtcatcaccaccagcacccgcacctgggctctgcccacctacaacaaccatctgtacaagcaaatttccagccagtctggagccagcaacgacaaccactactttggctacagcaccccttgggggtattttgacttcaacagattccactgccacttctccccacgtgactggcaaagactcatcaacaacaattggggattccggcccaaaagactcaacttcaagctctttaacattcaagtcaaggaggtcacgcagaatgacggtacgacgacgattgccaataaccttaccagcacggttcaggtgtttactgactcggagtaccagctcccgtacgtcctcggctcggcgcatcaaggatgcctcccgccgttcccagcagacgtcttcatggtgccacggtatggatacctcaccctgaacaacgggagtcaggcggtaggacgctcttcattttactgcctggagtactttccttctcagatgctgcgtaccggaaacaactttaccttcagctacacctttgaggacgttccttttcacagcagctacgctcacagccagagtttggaccgtctcatgaatcctctcatcgaccagtacctgtattacttgagcagaacaaacactccaagcggaaccactacgcagtccaggcttcagttttctcaagccggagcgagtgacattcgggaccagtctaggaactggcttcctggaccctgttaccgccagcagcgagtatcaaagacagctgcggacaacaacaacagtgattactcgtggactggagctaccaagtatcacctcaatggaagagactctctggtgaatccgggcacagccatggccagccacaaggacgatgaagaaaagtattttcctcagagcggggttctcatcttcggaaaacaagactcgggaaaaactaatgtggacattgaaaaggtcatgattacagacgaagaggaaatcaggaccaccaatcccgtggctacggagcagtatggttctgtatctaccaatctccagagcggcaacacacaagcagctacctcagatgtcaacacacaaggcgttcttccaggcatggtctggcaggacagagacgtgtacctgcagggacccatctgggcaaagattccacacacggacggacattttcacccttctcctcttatgggaggatttggactgaagcaccctcccccgcagattctcatcaagaataccccggtacctgcgaatccttctaccaccttcagcgcggcaaagtttgcttccttcatcacacagtactccacggggcaggtcagcgtggagatcgagtgggagctgcagaaagagaacagcaaacgctggaaccccgagatccagtatacctccaactacaacaagtctgttaatgtggactttactgtggacactaatggcgtgtattcagagcctcgccccattggcacaagatacctgactcgtaatctgtaa

SEQ ID NO: 3986 - DNA, 2208 bp, Artificial Sequence
  Description of Artificial Sequence: Synthetic polynucleotide
atggctgccgatggttatcttccagattggctcgaggacactctctctgaaggaataagacagtggtggaagctcaaacctggcccaccaccgccaaagcccgcagagcggcataaggacgacagcaggggtcttgtgcttcctgggtacaagtacctcggacccttcaacggactcgacaaaggagagccggtcaacgaggcagacgccgcggccctcgagcacgacaaggcctacgaccggcagctcgacagcggagacaacccgtacctcaagtacaaccacgccgacgcggagtttcaggagcgccttaaagaagatacgtcttttgggggcaacctcgcaagagcagtattccaggcgaaaaagagggttcttgaacctctgggcctggttgaggagcctgttaagacggctccgggaaaaaagaggccggtagagcactctcctgcggagccagattcctcctccggaactggaaagtcgggccaacagcctgcaagaaagagattgaattttggtcagactggagacgcagactccgtacctgacccccagcctctcggacagccaccagcagccccctctggtctgggaactaatacgatggcttcaggcagtggcgcaccaatggcagacaataacgagggcgccgacggagtgggtaattcctcgggaaattggcattgcgattccacatggatgggcgacagagtcatcaccaccagcacccgcacctgggctctgcccacctacaacaaccatctgtacaagcaaatttccagccagtctggagccagcaacgacaaccactactttggctacagcaccccttgggggtattttgacttcaacagattccactgccacttctccccacgtgactggcaaagactcatcaacaacaattggggattccggcccaaaagactcaacttcaagctctttaacattcaagtcaaggaggtcacgcagaatgacggtacgacgacgattgccaataaccttaccagcacggttcaggtgtttactgactcggagtaccagctcccgtacgtcctcggctcggcgcatcaaggatgcctcccgccgttcccagcagacgtcttcatggtgccacagtatggatacctcaccctgaacaacgggagtcaggcggtaggacgctcttcattttactgcctggagtactttccttctcagatgctgcgtaccggaaacaactttaccttcagctacacctttgaggacgttccttttcacagcagctacgctcacagccagagtttggaccgtctcatgaatcctctcatcgaccagtacctgtattacttgagcagaacaaacactccaagcggaaccactacgcagtccaggcttcagttttctcaagccggagcgagtgacattcgggaccagtctaggaactggcttcctggaccctgttaccgccagcagcgagtatcaaagacagctgcggacaacaacaacagtgattactcgtggactggagctaccaagtatcacctcaatggaagagactctctggtgaatccgggcacagccatggccagccacaaggacgatgaagaaaagtattttcctcagagcggggttctcatcttcggaaaacaagactcgggaaaaactaatgtggacattgaaaaggtcatgattacagacgaagaggaaatcaggaccaccaatcccgtggctacggagcagtatggttctgtatctaccaatctccagagcggcaacacacaagcagctacctcagatgtcaacacacaaggcgttcttccaggcatggtctggcaggacagagacgtgtacctgcagggacccatctgggcaaagattccacacacggacggacattttcacccttctcctcttatgggaggattgggacagaagcaccctcccccgcagagtctcatcaagaataccccggtacctgcgaatccttctaccaccttcagcgcggcaaagtttgcttccttcatcacacagtactccacggggcaggtcagcgtggagatcgagtgggagctgcagaaagagaacagcaaacgctggaaccccgagatccagtatacctccaactacaacaagtctgttaatgtggactttactgtggacactaatggcgtgtattcagagcctcgccccattggcacaagatacctgactcgtaatctgtaa

SEQ ID NO: 3987 - DNA, 2208 bp, Artificial Sequence
  Description of Artificial Sequence: Synthetic polynucleotide
atggctgccgatggttatcttccagattggctcgaggacactctctctgaaggaataagacagtggtggaagctcaaacctggcccaccaccgccaaagcccgcagagcggcataaggacgacagcaggggtcttgtgcttcctgggtacaagtacctcggacccttcaacggactcgacaaaggagagccggtcaacgaggcagacgccgcggccctcgagcacgacaaggcctacgaccggcagctcgacagcggagacaacccgtacctcaagtacaaccacgccgacgcggagtttcaggagcgccttaaagaagatacgtcttttgggggcaacctcgcaagagcagtattccaggcgaaaaagagggttcttgaacctctgggcctggttgaggagcctgttaagacggctccgggaaaaaagaggccggtagagcactctcctgcggagccagattcctcctccggaactggaaagtcgggccaacagcctgcaagaaagagattgaattttggtcagactggagacgcagactccgtacctgacccccagcctctcggacagccaccagcagccccctctggtctgggaactaatacgatggcttcaggcagtggcgcaccaatggcagacaataacgagggcgccgacggagtgggtaattcctcgggaaattggcattgcgattccacatggatgggcgacagagtcatcaccaccagcacccgcacctgggctctgcccacctacaacaaccatctgtacaagcaaatttccagccagtctggagccagcaacgacaaccactactttggctacagcaccccttgggggtattttgacttcaacagattccactgccacttctccccacgtgactggcaaagactcatcaacaacaattggggattccggcccaaaagactcaacttcaagctctttaacattcaagtcaaggaggtcacgcagaatgacggtacgacgacgattgccaataaccttaccagcacggttcaggtgtttactgactcggagtaccagctcccgtacgtcctcggctcggcgcatcaaggatgcctcccgccgttcccagcagacgtcttcatggtgccacagtatggatacctcaccctgaacaacgggagtcaggcggtaggacgctcttcattttactgcctggagtactttccttctcagatgctgcgtaccggaaacaactttaccttcagctacacctttgaggacgttccttttcacagcagctacgctcacagccagagtttggaccgtctcatgaatcctctcatcgaccagtacctgtattacttgagcagaacaaacactccaagcggaaccactacgcagtccaggcttcagttttctcaagccggagcgagtgacattcgggaccagtctaggaactggcttcctggaccctgttaccgccagcagcgagtatcaaagacagctgcggacaacaacaacagtgattactcgtggactggagctaccaagtatcacctcaatggaagagactctctggtgaatccgggcacagccatggccagccacaaggacgatgaagaaaagtattttcctcagagcggggttctcatcttcggaaaacaagactcggagaaaactaatgtggacattgaaaaggtcatgattacagacgaagaggaaatcaggaccaccaatcccgtggctacggagcagtatggttctgtatctaccaatctccagagcggcaacacacaagcagctacctcagatgtcaacacacaaggcgttcttccaggcatggtctggcaggacagagacgtgtacctgcagggacccatctgggcaaagattccacacacggacggacattttcacccttctcctcttatgggaggatttggactgaagcaccctcccccgcagattctcatcaagaataccccggtacctgcgaatccttctaccaccttcagcgcggcaaagtttgcttccttcatcacacagtactccacggggcaggtcagcgtggagatcgagtgggagctgcagaaagagaacagcaaacgctggaaccccgagatccagtatacctccaactacaacaagtctgttaatgtggactttactgtggacactaatggcgtgtattcagagcctcgccccattggcacaagatacctgactcgtaatctgtaa

SEQ ID NO: 3988 - DNA, 2208 bp, Artificial Sequence
  Description of Artificial Sequence: Synthetic polynucleotide
atggctgccgatggttatcttccagattggctcgaggacactctctctgaaggaataagacagtggtggaagctcaaacctggcccaccaccgccaaagcccgcagagcggcataaggacgacagcaggggtcttgtgcttcctgggtacaagtacctcggacccttcaacggactcgacaaaggagagccggtcaacgaggcagacgccgcggccctcgagcacgacaaggcctacgaccggcagctcgacagcggagacaacccgtacctcaagtacaaccacgccgacgcggagtttcaggagcgccttaaagaagatacgtcttttgggggcaacctcgcaagagcagtattccaggcgaaaaagagggttcttgaacctctgggcctggttgaggagcctgttaagacggctccgggaaaaaagaggccggtagagcactctcctgcggagccagattcctcctccggaactggaaagtcgggccaacagcctgcaagaaagagattgaattttggtcagactggagacgcagactccgtacctgacccccagcctctcggacagccaccagcagccccctctggtctgggaactaatacgatggcttcaggcagtggcgcaccaatggcagacaataacgagggcgccgacggagtgggtaattcctcgggaaattggcattgcgattccacatggatgggcgacagagtcatcaccaccagcacccgcacctgggctctgcccacctacaacaaccatctgtacaagcaaatttccagccagtctggagccagcaacgacaaccactactttggctacagcaccccttgggggtattttgacttcaacagattccactgccacttctccccacgtgactggcaaagactcatcaacaacaattggggattccggcccaaaagactcaacttcaagctctttaacattcaagtcaaggaggtcacgcagaatgacggtacgacgacgattgccaataaccttaccagcacggttcaggtgtttactgactcggagtaccagctcccgtacgtcctcggctcggcgcatcaaggatgcctcccgccgttcccagcagacgtcttcatggtgccacagtatggatacctcaccctgaacaacgggagtcaggcggtaggacgctcttcattttactgcctggagtactttccttctcagatgctgcgtaccggaaacaactttaccttcagctacacctttgaggacgttccttttcacagcagctacgctcacagccagagtttggaccgtctcatgaatcctctcatcgaccagtacctgtattacttgagcagaacaaacactccaagcggaaccactacgcagtccaggcttcagttttctcaagccggagcgagtgacattcgggaccagtctaggaactggcttcctggaccctgttaccgccagcagcgagtatcaaagacagctgcggacaacaacaacagtgattactcgtggactggagctaccaagtatcacctcaatggaagagactctctggtgaatccgggcacagccatggccagccacaaggacgatgaagaaaagtattttcctcagagcggggttctcatcttcggaaaacaagactcgggaaaaactaatgtggacattgaaaaggtcatgattacagacgaagaggaaatcaggaccaccaatcccgtggctacggagcagtatggttctgtatctaccaatctccagagcggcaacacacaagcagctacctcagatgtcaacacacaaggcgttcttccaggcatggtctggcaggacagagacgtgtacctgcagggacccatctgggcaaagattccacacacggacggacattttcacccttctcctcttatgggaggatttggacagaagcaccctcccccgcagagtctcatcaagaataccccggtacctgcgaatccttctaccaccttcagcgcggcaaagtttgcttccttcatcacacagtactccacggggcaggtcagcgtggagatcgagtgggagctgcagaaagagaacagcaaacgctggaaccccgagatccagtatacctccaactacaacaagtctgttaatgtggactttactgtggacactaatggcgtgtattcagagcctcgccccattggcacaagatacctgactcgtaatctgtaa

SEQ ID NO: 3989 - DNA, 2208 bp, Artificial Sequence
  Description of Artificial Sequence: Synthetic polynucleotide
atggctgccgatggttatcttccagattggctcgaggacactctctctgaaggaataagacagtggtggaagctcaaacctggcccaccaccgccaaagcccgcagagcggcataaggacgacagcaggggtcttgtgcttcctgggtacaagtacctcggacccttcaacggactcgacaaaggagagccggtcaacgaggcagacgccgcggccctcgagcacgacaaggcctacgaccggcagctcgacagcggagacaacccgtacctcaagtacaaccacgccgacgcggagtttcaggagcgccttaaagaagatacgtcttttgggggcaacctcgcaagagcagtattccaggcgaaaaagagggttcttgaacctctgggcctggttgaggagcctgttaagacggctccgggaaaaaagaggccggtagagcactctcctgcggagccagattcctcctccggaactggaaagtcgggccaacagcctgcaagaaagagattgaattttggtcagactggagacgcagactccgtacctgacccccagcctctcggacagccaccagcagccccctctggtctgggaactaatacgatggcttcaggcagtggcgcaccaatggcagacaataacgagggcgccgacggagtgggtaattcctcgggaaattggcattgcgattccacatggatgggcgacagagtcatcaccaccagcacccgcacctgggctctgcccacctacaacaaccatctgtacaagcaaatttccagccagtctggagccagcaacgacaaccactactttggctacagcaccccttgggggtattttgacttcaacagattccactgccacttctccccacgtgactggcaaagactcatcaacaacaattggggattccggcccaaaagactcaacttcaagctctttaacattcaagtcaaggaggtcacgcagaatgacggtacgacgacgattgccaataaccttaccagcacggttcaggtgtttactgactcggagtaccagctcccgtacgtcctcggctcggcgcatcaaggatgcctcccgccgttcccagcagacgtcttcatggtgccacagtatggatacctcaccctgaacaacgggagtcaggcggtaggacgctcttcattttactgcctggagtactttccttctcagatgctgcgtaccggaaacaactttaccttcagccacacctttgaggacgttccttttcacagcagctacgctcacagccagagtttggaccgtctcatgaatcctctcatcgaccagtacctgtattacttgagcagaacaaacactccaagcggaaccactacgcagtccaggcttcagttttctcaagccggagcgagtgacattcgggaccagtctaggaactggcttcctggaccctgttaccgccagcagcgagtatcaaagacagctgcggacaacaacaacagtgattactcgtggactggagctaccaagtatcacctcaatggaagagactctctggtgaatccgggcacagccatggccagccacaaggacgatgaagaaaagtattttcctcagagcggggttctcatcttcggaaaacaagactcgggaaaaactaatgtggacattgaaaaggtcatgattacagacgaagaggaaatcaggaccaccaatcccgtggctacggagcagtatggttctgtatctaccaatctccagagcggcaacacacaagcagctacctcagatgtcaacacacaaggcgttcttccaggcatggtctggcaggacagagacgtgtacctgcagggacccatctgggcaaagattccacacacggacggacattttcacccttctcctcttatgggaggatttggactgaagcaccctcccccgcagattctcatcaagaataccccggtacctgcgaatccttctaccaccttcagcgcggcaaagtttgcttccttcatcacacagtactccacggggcaggtcagcgtggagatcgagtgggagctgcagaaagagaacagcaaacgctggaaccccgagatccagtatacctccaactacaacaagtctgttaatgtggactttactgtggacactaatggcgtgtattcagagcctcgccccattggcacaagatacctgactcgtaatctgtaa

SEQ ID NO: 3990 - DNA, 2208 bp, Artificial Sequence
  Description of Artificial Sequence: Synthetic polynucleotide
atggctgccgatggttatcttccagattggctcgaggacactctctctgaaggaataagacagtggtggaagctcaaacctggcccaccaccgccaaagcccgcagagcggcataaggacgacagcaggggtcttgtgcttcctgggtacaagtacctcggacccttcaacggactcgacaaaggagagccggtcaacgaggcagacgccgcggccctcgagcacgacaaggcctacgaccggcagctcgacagcggagacaacccgtacctcaagtacaaccacgccgacgcggagtttcaggagcgccttaaagaagatacgtcttttgggggcaacctcgcaagagcagtattccaggcgaaaaagagggttcttgaacctctgggcctggttgaggagcctgttaagacggctccgggaaaaaagaggccggtagagcactctcctgcggagccagattcctcctccggaactggaaagtcgggccaacagcctgcaggaaagagattgaattttggtcggactggagacgcagactccgtacctgacccccagcctctcggacagccaccagcagccccctctggtctgggaactaatacgatggcttcaggcagtggcgcaccaatggcagacaataacgagggcgccgacggagtgggtaattcctcgggaaattggcattgcgattccacatggatgggcgacagagtcatcaccaccagcacccgcacctgggctctgcccacctacaacaaccatctgtacaagcaaatttccagccagtctggagccagcaacgacaaccactactttggctacagcaccccttgggggtattttgacttcaacagattccactgccacttctccccacgtgactggcaaagactcatcaacaacaattggggattccggcccaaaagactcaacttcaagctctttaacattcaagtcaaggaggtcacgcagaatgacggtacgacgacgattgccaataaccttaccagcacggttcaggtgtttactgactcggagtaccagctcccgtacgtcctcggctcggcgcatcaaggatgcctcccgccgttcccagcagacgtcttcatggtgccacagtatggatacctcaccctgaacaacgggagtcaggcggtaggacgctcttcattttactgcctggagtactttccttctcagatgctgcgtaccggaaacaactttaccttcagctacacctttgaggacgttccttttcacagcagctacgctcacagccagagtttggaccgtctcatgaatcctctcatcgaccagtacctgtattacttgagcagaacaaacactccaagcggaaccactacgcagtccaggcttcagttttctccagccggagcgagtgacattcgggaccagtctaggaactggcttcctggaccctgttaccgccagcagcgagtatcaaagacagctgcggacaacaacaacagtgattactcgtggactggagctaccaagtatcacctcaatggaagagactctctggtgaatccgggcacagccatggccagccacaaggacgatgaagaaaagtattttcctcagagcggggttctcatcttcggaaaacaagactcgggaaaaactaatgtggacattgaaaaggtcatgattacagacgaagaggaaatcaggaccaccaatcccgtggctacggagcagtatggttctgtatctaccaatctccagagcggcaacacacaagcagctacctcagatgtcaacacacaaggcgttcttccaggcatggtctggcaggacagagacgtgtacctgcagggacccatctgggcaaagattccacacacggacggacattttcacccttctcctcttatgggaggatttggactgaagcaccctcccccgcagattctcatcaagaataccccggtacctgcgaatccttctaccaccttcagcgcggcaaagtttgcttccttcatcacacagtactccacggggcaggtcagcgtggagatcgagtgggagctgcagaaagagaacagcaaacgctggaaccccgagatccagtatacctccaactacaacaagtctgttaatgtggactttactgtggacactaatggcgtgtattcagagcctcgccccattggcacaagatacctgactcgtaatctgtaa

SEQ ID NO: 3991 - DNA, 2205 bp, Artificial Sequence
  Description of Artificial Sequence: Synthetic polynucleotide
atggctgccgatggttatcttccagattggctcgaggacactctctctgaaggaataagacagtggtggaagctcaaacctggcccaccaccgccaaagcccgcagagcggcataaggacgacagcaggggtcttgtgcttcctgggtacaagtacctcggacccttcaacggactcgacaaaggagagccggtcaacgaggcagacgccgcggccctcgagcacgacaaggcctacgaccggcagctcgacagcggagacaacccgtacctcaagtacaaccacgccgacgcggagtttcaggagcgccttaaagaagatacgtcttttgggggcaacctcgcaagagcagtattccaggcgaaaaagagggttcttgaacctctgggcctggttgaggagcctgttaagacggctccgggaaaaaagaggccggtagagcactctcctgcggagccagattcctcctccggaactggaaagtcgggccaacagcctgcaagaaagagattgaattttggtcagactggagacgcagactccgtacctgacccccagcctctcggacagccaccagcagccccctctggtctgggaactaatacgatggcttcaggcagtggcgcaccaatggcagacaataacgagggcgccgacggagtgggtaattcctcgggaaattggcattgcgattccacatggatgggcgacagagtcatcaccaccagcacccgcacctgggctctgcccacctacaacaaccatctgtacaagcaaatttccagccagtctggagccagcaacgacaaccactactttggctacagcaccccttgggggtattttgacttcaacagattccactgccacttctccccacgtgactggcaaagactcatcaacaacaattggggattccggcccaaaagactcaacttcaagctctttaacattcaagtcaaggaggtcacgcagaatgacggtacgacgacgattgccaataaccttaccagcacggttcaggtgtttactgactcggagtaccagctcccgtacgtcctcggctcggcgcatcaaggatgcctcccgccgttcccagcagacgtcttcatggtgccacagtatggatacctcaccctgaacaacgggagtcaggcggtaggacgctcttcattttactgcctggagtactttccttctcagatgctgcgtaccggaaacaactttaccttcagctacacctttgaggacgttccttttcacagcagctacgctcacagccagagtttggaccgtctcatgaatcctctcatcgaccagtacctgtattacttgagcagaacaaacactccaagcggaaccactacgcagtccaggcttcagttttctcaagccggagcgagtgacattcgggaccagtctaggaactggcttcctggaccctgttaccgccagcagcgagtatcaaagacagctgcggacaacaacagtgattactcgtggactggagctaccaagtatcacctcaatggaagagactctctggtgaatccgggcacagccatggccagccacaaggacgatgaagaaaagtattttcctcagagcggggttctcatcttcggaaaacaagactcgggaaaaactaatgtggacattgaaaaggtcatgattacagacgaagaggaaatcaggaccaccaatcccgtggctacggagcagtatggttctgtatctaccaatctccagagcggcaacacacaagcagctacctcagatgtcaacacacaaggcgttcttccaggcatggtctggcaggacagagacgtgtacctgcagggacccatctgggcaaagattccacacacggacggacattttcacccttctcctcttatgggaggatttggactgaagcaccctcccccgcagattctcatcaagaataccccggtacctgcgaatccttctaccaccttcagcgcggcaaagtttgcttccttcatcacacagtactccacggggcaggtcagcgtggagatcgagtgggagctgcagaaagagaacagcaaacgctggaaccccgagatccagtatacctccaactacaacaagtctgttaatgtggactttactgtggacactaatggcgtgtattcagagcctcgccccattggcacaagatacctgactcgtaatctgtaa

SEQ ID NO: 3992 - DNA, 2217 bp, Artificial Sequence
  Description of Artificial Sequence: Synthetic polynucleotide
atggctgccgatggttatcttccagattggctcgaggacaacctctctgagggcattcgcgagtggtgggcgctgaaacctggagccccgaagcccaaagccaaccagcaaaagcaggacgacggccggggtctggtgcttcctggctacaagtacctcggacccttcaacggactcgacaagggggagcccgtcaacgcggcggacgcagcggccctcgagcacgacaaggcctacgaccagcagctgcaggcgggtgacaatccgtacctgcggtataaccacgccgacgccgagtttcaggagcgtctgcaagaagatacgtcttttgggggcaacctcgggcgagcagtcttccaggccaagaagcgggttctcgaacctctcggtctggttgaggaaggcgctaagacggctcctggaaagaagagaccggtagagccatcaccccagcgttctccagactcctctacgggcatcggcaagaaaggccaacagcccgccagaaaaagactcaattttggtcagactggcgactcagagtcagttccagaccctcaacctctcggagaacctccagcagcgccctctggtgtgggacctaatacaatggctgcaggcggtggcgcaccaatggcagacaataacgaaggcgccgacggagtgggtagttcctcgggaaattggcattgcgattccacatggctgggcgacagagtcatcaccgccagcacccgaacctgggccctgcccacctacaacaaccacctctacaagcaaatctccaacgggacatcggggggagccaccaacgacaacacctacttcggctacagcaccccctgggggtattttgactttaacagattccactgccacttttcaccacgtgactggcagcgactcatcaacaacaactggggattccggcccaagagactcagcttcaagctcttcaacatccaggtcaaggaggtcacgcagaatgaaggcaccaagaccatcgccaataacctcaccagcaccatccaggtgtttacggactcggagtaccagctgccgtacgttctcggctctgcccaccagggctgcctgcctccgttcccggcggacgtgttcacgattccccagtacggctacctaacactcaacaacggtagtcaggccgtgggacgctcctccttctactgcctggaatactttccttcgcagatgctgagaaccggcaacaacttccagtttacttacaccttcgaggacgtgcctttccacagcagctacgcccacagccagagcttggaccggctgatgaatcctctgattgaccagtacctgtactacttgtctcggactcaaacaacaggaggcacggcaaatacgcagactctgggcttcagccaaggtgggcctaatacaatggccaatcaggcaaagaactggctgccaggaccctgttaccgccaacaacgcgtctcaacgacaaccgggcaaaacaacaatagcaactttgcctggactgctgggaccaaataccatctgaatggaagaaattcattggctaatcctggcatcgctatggcaacacacaaagacgacgaggagcgtttttttcccagtaacgggatcctgatttttggcaaacaaaatgctgccagagacaatgcggattacagcgatgtcatgctcaccagcgaggaagaaatcaaaaccactaaccctgtggctacagaggaatacggtatcgtggcagataacttgcagcagcaaaacacggctcctcaaattggaactgtcaacagccagggggccttacccggtatggtctggcagaaccgggacgtgtacctgcagggtcccatctgggccaagattcctcacacggacggcaacttccacccgtctccgctgatgggcggctttggcctgaaacatcctccgcctcagatcctgatcaagaacacgcctgtacctgcggatcctccgaccaccttcaaccagtcaaagctgaactctttcatcacgcaatacagcaccggacaggtcagcgtggaaattgaatgggagctgcagaaggaaaacagcaagcgctggaaccccgagatccagtacacctccaactactacaaatctacaagtgtggactttgctgttaatacagaaggcgtgtactctgaaccccgccccattggcacccgttacctcacccgtaatctgtaa

SEQ ID NO: 3993 - DNA, 2217 bp, Artificial Sequence
  Description of Artificial Sequence: Synthetic polynucleotide
atggctgccgatggttatcttccagattggctcgaggacaacctctctgagggcattcgcgagtggtgggcgctgaaacctggagccccgaagcccaaagccaaccagcaaaagcaggacgacggccggggtctggtgcttcctggctacaagtacctcggacccttcaacggactcgacaagggggggcccgtcaacgcggcggacgcagcggccctcgagcacgacaaggcctacgaccagcagctgcaggcgggtgacaatccgtacctgcggtataaccacgccgacgccgagtttcaggagcgtctgcaagaagatacgtcttttgggggcaacctcgggcgagcagtcttccaggccaagaagcgggttctcgaacctctcggtctggttgaggaaggcgctaagacggctcctggaaagaagagaccggtagagccatcaccccagcgttctccagactcctctacgggcatcggcaagaaaggccaacagcccgccagaaaaagactcaattttggtcagactggcgactcagagtcagttccagaccctcaacctctcggagaacctccagcagcgccctctggtgtgggacctaatacaatggctgcaggcggtggcgcaccaatggcagacaataacgaaggcgccgacggagtgggtagttcctcgggaaattggcattgcgattccacatggctgggcgacagagtcatcaccaccagcacccgaacctgggccctgcccacctacaacaaccacctctacaagcaaatctccaacgggacatcgggaggagccaccaacgacaacacctacttcggctacagcaccccctgggggtattttgactttaacagattccactgccacttttcaccacgtgactggcagcgactcatcaacaacaactggggattccggcccaagagactcagcttcaagctcttcaacatccaggtcaaggaggtcacgcagaatgaaggcaccaagaccatcgccaataacctcaccagcaccatccaggtgtttacggactcggagtaccagctgccgtacgttctcggctctgcccaccagggctgcctgcctccgttcccggcggacgtgttcatgattccccagtacggctacctaacactcaacaacggtagtcaggccgtgggacgctcctccttctactgcctggaatactttccttcgcagatgctgagaaccggcaacaacttccagtttacttacaccttcgaggacgtgcctttccacagcagctacgcccacagccagagcttggaccggctgatgaatcctctgattgaccagtacctgtactacttgtctcggactcaaacaacaggaggcacggcaaatacgcagactctgggcttcagccaaggtgggcctaatacaatggccaatcaggcaaagaactggctgccaggaccctgttaccgccaacaacgcgtctcaacgacaaccgggcaaaacaacaatagcaactttgcctggactgctgggaccaaataccatctgaatggaagaaattcattggctaatcctggcatcgctatggcaacacacaaagacgacgaggagcgtttttttcccagtaacgggatcctgatttttggcaaacaaaatgctgccagagacaatgcggattacagcgatgtcatgctcaccagcgaggaagaaatcaaaaccactaaccctgtggctacagaggaatacggtatcgtggcagataacttgcagcagcaaaacacggctcctcaaattggaactgtcaacagccagggggccttacccggtatggtctggcagaaccgggacgtgtacctgcagggtcccatctgggccaagattcctcacacggacggcaacttccacccgtctccgctgatgggcggctttggcctgaaacatcctccgcctcagatcctgatcaagaacacgcctgtacctgcggatcctccgaccaccttcaaccagtcaaagctgaactctttcatcacgcaatacagcaccggacaggtcagcgtggaaattgaatgggagctgcagaaggaaaacagcaagcgctggaaccccgagatccagtacacctccaactactacaaatctacaagtgtggactttgctgttaatacagaaggcgtgtactctgaaccccgccccattggcacccgttacctcacccgtaatctgtaa

SEQ ID NO: 3994 - DNA, 2217 bp, Artificial Sequence
  Description of Artificial Sequence: Synthetic polynucleotide
atggctgccgatggttatcttccagattggctcgaggacaacctctctgagggcattcgcgagtggtgggcgctgaaacctggagccccgaagcccaaagccaaccagcaaaagcaggacgacggccggggtctggtgcttcctggctacaagtacctcggacccttcaacggactcgacaagggggagcccgtcaacgcggcggacgcagcggccctcgagcacgacaaggcctacgaccagcagctgcaggcgggtgacaatccgtacctgcggtataaccacgccgacgccgagtttcaggagcgtctgcaagaagatacgtcttttgggggcaacctcgggcgagcagtcttccaggccaagaagcgggttctcgaacctctcggtctggttgaggaaggcgctaagacggctcctggaaagaagagaccggtagagccatcaccccagcgttctccagactcctctacgggcatcggcaagaaaggccaacagcccgccagaaaaagactcaattttggtcagactggcgactcagagtcagttccagaccctcaacctctcggagaacctccagcagcgccctctggtgtgggacctaatacaatggctgcaggcggtggcgcaccaatggcagacaataacgaaggcgccgacggagtgggtagttcctcgggaaattggcattgcgattccacatggctgggcgacagagtcatcaccaccagcacccgaacctgggccctgcccacctacaacaaccacctctacaggcaaatctccaacgggacatcgggaggagccaccaacgacaacacctacttcggctacagcaccccctgggggtattttgactttaacagattccactgccacttttcaccacgtgactggcagcgactcatcaacaacaactggggattccggcccaagagactcagcttcaagctcttcaacatccaggtcaaggaggtcacgcagaatgaaggcaccaagaccatcgccaataacctcaccagcaccatccaggtgtttacggactcggagtaccagctgccgtacgttctcggctctgcccaccagggctgcctgcctccgttcccggcggacgtgttcatgattccccagtacggctacctaacactcaacaacggtagtcaggccgtgggacgctcctccttctactgcctggaatactttccttcgcagatgctgagaaccggcaacaacttccagtttacttacaccttcgaggacgtgcctttccacagcagctacgcccacagccagagcttggaccggctgatgaatcctctgattgaccagtacctgtactacttgtctcggactcaaacaacaggaggcacggcaaatacgcagactctgggcttcagccaaggtgggcctaatacaatggccaatcaggcaaagaactggctgccaggaccctgttaccgccaacaacgcgtctcaacgacaaccgggcaaaacaacaatagcaactttgcctggactgctgggaccaaataccatctgaatggaagaaattcattggctaatcctggcatcgctatggcaacacacaaagacgacgaggagcgtttttttcccagtaacgggatcctgatttttggcaaacaaaatgctgccagagacaatgcggattacagcgatgtcatgctcaccagcgaggaagaaatcaaaaccactaaccctgtggctacagaggaatacggtatcgtggcagataacttgcagcagcaaaacacggctcctcaaattggaactgtcaacagccagggggccttacccggtatggtctggcagaaccgggacgtgtacctgcagggtcccatctgggccaagattcctcacacggacggcaacttccacccgtctccgctgatgggcggctttggcctgaaacatcctccgcctcagatcctgatcaagaacacgcctgtacctgcggatcctccgaccaccttcaaccagtcaaagctgaactctttcatcacgcaatacagcaccggacaggtcagcgtggaaattgaatgggagctgcagaaggaaaacagcaagcgctggaaccccgagatccagtacacctccaactactacaaatctacaagtgtggactttgctgttaatacagaaggcgtgtactctgaaccccgccccattggcacccgttacctcacccgtaatctgtaa

SEQ ID NO: 3995 - DNA, 2217 bp, Artificial Sequence
  Description of Artificial Sequence: Synthetic polynucleotide
atggctgccgatggttatcttccagattggctcgaggacaacctctctgagggcattcgcgagtggtgggcgctgaaacctggagccccgaagcccaaagccaaccagcaaaagcaggacgacggccggggtctggtgcttcctggctacaagtacctcggacccttcaacggactcgacaagggggagcccgtcaacgcggcggacgcagcggccctcgagcacgacaaggcctacgaccagcagctgcaggcgggtgacaatccgtacctgcggtataaccacgccgacgccgagttccaggagcgtctgcaagaagatacgtcttttgggggcaacctcgggcgagcagtcttccaggccaagaagcgggttctcgaacctctcggtctggttgaggaaggcgctaagacggctcctggaaagaagagaccggtagagccatcaccccagcgttctccagactcctctacgggcatcggcaagaaaggccaacagcccgccagaaaaagactcaattttggtcagactggcgactcagagtcagttccagaccctcaacctctcggagaacctccagcagcgccctctggtgtgggacctaatacaatggctgcaggcggtggcgcaccaatggcagacagtaacgaaggcgccgacggagtgggtagttcctcgggaaattggcattgcgattccacatggctgggcgacagagtcatcaccaccagcacccgaacctgggccctgcccacctacaacaaccacctctacaagcaaatctccaacgggacatcgggaggagccaccaacgacaacacctacttcggctacagcaccccctgggggtattttgactttaacagattccactgccacttttcaccacgtgactggcagcgactcatcaacaacaactggggattccggcccaagagactcagcttcaagctcttcaacatccaggtcaaggaggtcacgcagaatgaaggcaccaagaccatcgccaataacctcaccagcaccatccaggtgtttacggactcggagtaccagctgccgtacgttctcggctctgcccaccagggctgcctgcctccgttcccggcggacgtgttcatgattccccagtacggctacctaacactcaacaacggtagtcaggccgtgggacgctcctccttctactgcctggaatactttccttcgcagatgctgagaaccggcaacaacttccagtttacttacaccttcgaggacgtgcctttccacagcagctacgcccacagccagagcttggaccggctgatgaatcctctgattgaccagtacctgtactacttgtctcggactcaaacaacaggaggcacggcaaatacgcagactctgggcttcagccaaggtgggcctaatacaatggccaatcaggcaaagaactggctgccaggaccctgttaccgccaacaacgcgtctcaacgacaaccgggcaaaacaacaatagcaactttgcctggactgctgggaccaaataccatctgaatggaagaaattcattggctaatcctggcatcgctatggcaacacacaaagacgacgaggagcgtttttttcccagtaacgggatcctgatttttggcaaacaaaatgctgccagagacaatgcggattacagcgatgtcatgctcaccagcgaggaagaaatcaaaaccactaaccctgtggctacagaggaatacggtatcgtggcagataacttgcagcagcaaaacacggctcctcaaattggaactgtcaacagccagggggccttacccggtatggtctggcagaaccgggacgtgtacctgcagggtcccatctgggccaagattcctcacacggacggcaacttccacccgtctccgctgatgggcggctttggcctgaaacatcctccgcctcagatcctgatcaagaacacgcctgtacctgcggatcctccgaccaccttcaaccagtcaaagctgaactctttcatcacgcaatacagcaccggacaggtcagcgtggaaattgaatgggagctgcagaaggaaaacagcaagcgctggaaccccgagatccagtacacctccaactactacaaatctacaagtgtggactttgctgttaatacagaaggcgtgtactctgaaccccgccccattggcacccgttacctcacccgtaatctgtaa

SEQ ID NO: 3996 - DNA, 2217 bp, Artificial Sequence
  Description of Artificial Sequence: Synthetic polynucleotide
atggctgccgatggttatcttccagattggctcgaggacaacctctctgagggcattcgcgagtggtgggcgctgaaacctggagccccgaagcccaaagccaaccagcaaaagcaggacgacggccggggtctggtgcttcctggctacaagtacctcggacccttcaacggactcgacaagggggagcccgtcaacgcggcggacgcagcggccctcgagcacgacaaggcctacgaccagcagctgcaggcgggtgacaatccgtacctgcggtataaccacgccgacgccgagtttcaggagcgtctgcaagaagatacgtcttttgggggcaacctcgggcgagcagtcttccaggccaagaagcgagttctcgaacctctcggtctggttgaggaaggcgctaagacggctcctggaaagaagagaccggtagagccatcaccccagcgttctccagactcctctacgggcatcggcaagaaaggccaacagcccgccagaaaaagactcaattttggtcagactggcgactcagagtcagttccagaccctcaacctctcggagaacctccagcagcgccctctggtgtgggacctaatacaatggctgcaggcggtggcgcaccaatggcagacaataacgaaggcgccgacggagtgggtagttcctcgggaaattggcattgcgattccacatggctgggcgacagagtcatcaccaccagcacccgaacctgggccctgcccacctacaacaaccacctctacaagcaaatctccaacgggacgtcgggaggagccaccaacgacaacacctacttcggctacagcaccccctgggggtattttgactttaacagattccactgccacttttcaccacgtgactggcagcgactcatcaacaacaactggggattccggcccaagagactcagcttcaagctcttcaacatccaggtcaaggaggtcacgcagaatgaaggcaccaagaccatcgccaataacctcaccagcaccatccaggtgtttacggactcggagtaccagctgccgtacgttctcggctctgcccaccagggctgcctgcctccgttcccggcggacgtgttcatgattccccagtacggctacctaacactcaacaacggtagtcaggccatgggacgctcctccttctactgcctggaatactttccttcgcagatgctgagaaccggcaacaacttccagtttacttacaccttcgaggacgtgcctttccacagcagctacgcccacagccagagcttggaccggctgatgaatcctctgattgaccagtacctgtactacttgtctcggactcaagcaacaggaggcacggcaaatacgcagactctgggcttcagccaaggtgggcctaatacaatggccaatcaggcaaagaactggctgccaggaccctgttaccgccaacaacgcgtctcaacgacaaccgggcaaaacaacaatagcaactttgcctggactgctgggaccaaataccatctgaatggaagaaattcattggctaatcctggcatcgctatggcaacacacaaagacgacgaggagcgtttttttcccagtaacgggatcctgatttttggcaaacaaaatgctgccagagacaatgcggattacagcgatgtcatgctcaccagcgaggaagaaatcaaaaccactaaccctgtggctacagaggaatacggtatcgtggcagataacttgcagcagcaaaacacggctcctcaaattggaactgtcaacagccagggggccttacccggtatggtctggcagaaccgggacgtgtacctgcagggtcccatctgggccaagattcctcacacggacggcaacttccacccgtctccgctgatgggcggctttggcctgaaacatcctccgcctcagatcctgatcaagaacacgcctgtacctgcggatcctccgaccaccttcaaccagtcaaagctgaactctttcatcacgcaatacagcaccggacaggtcagcgtggaaattgaatgggagctgcagaaggaaaacagcaagcgctggaaccccgagatccagtacacctccaactactacaaatctacaagtgtggactttgctgttaatacagaaggcgtgtactctgaaccccgccccattggcacccgttacctcacccgtaatctgtaa

SEQ ID NO: 3997 - DNA, 2217 bp, Artificial Sequence
  Description of Artificial Sequence: Synthetic polynucleotide
atggctgccgatggttatcttccagattggctcgaggacaacctctctgagggcattcgcgagtggtgggcgctgaaacctggagccccgaagcccaaagccaaccagcaaaagcaggacgacggccggggtctggtgcttcctggctacaagtacctcggacccttcaacggactcgacaagggggagcccgtcaacgcggcggacgcagcggccctcgagcacgacaaggcctacgaccagcagctgcaggcgggtaacaatccgtacctgcggtataaccacgccgacgccgagtttcaggagcgtctgcaagaagatacgtcttttgggggcaacctcgggcgagcagtcttccaggccaagaagcgggttctcggacctctcggtctggttgaggaaggcgctaagacggctcctggaaagaagagaccggtagagccatcaccccagcgttctccagactcctctacgggcatcggcaagaaaggccaacagcccgccagaaaaagactcaattttggtcagactggcgactcagagtcagttccagaccctcaacctctcggagaacctccagcagcgccctctggtgtgggacctaatacaatggctgcaggcggtggcgcaccaatggcagacaataacgaaggcgccgacggagtgggtagttcctcgggaaattggcattgcgattccacatggctgggcgacagagtcatcaccaccagcacccgaacctgggccctgcccacctacaacaaccacctctacaagcaaatctccaacgggacatcgggaggagccaccaacgacaacacctacttcggctacagcaccccctgggggtattttgactttaacagattccactgccacttttcaccacgtgactggcagcgactcatcaacaacaactggggattccggcccaagagactcagcttcaagctcttcaacatccaggtcaaggaggtcacgcagaatgaaggcaccaagaccatcgccaataacctcaccagcaccatccaggtgtttacggactcggagtaccagctgccgtacgttctcggctctgcccaccagggctgcctgcctccgttcccggcggacgtgttcatgattccccagtacggctacctaacactcaacaacggtagtcgggccgtgggacgctcctccttctactgcctggaatactttccttcgcagatgctgagaaccggcaacaacttccagtttacttacaccttcgaggacgtgcctttccacagcagctacgcccacagccagagcttggaccggctgatgaatcctctgattgaccagtacctgtactacttgtctcggactcaaacaacaggaggcacggcaaatacgcagactctgggcttcagccaaggtgggcctaatacaatggccaatcaggcaaagaactggctgccaggaccctgttaccgccaacaacgcgtctcaacgacaaccgggcaaaacaacaatagcaactttgcctggactgctgggaccaaataccatctgaatggaagaaattcattggctaatcctggcatcgctatggcaacacacaaagacgacgaggagcgtttttttcccagtaacgggatcctgatttttggcaaacaaaatgctgccagagacaatgcggattacagcgatgtcatgctcaccagcgaggaagaaatcaaaaccactaaccctgtggctacagaggaatacggtatcgtggcagataacttgcagcagcaaaacacggctcctcaaattggaactgtcaacagccagggggccttacccggtatggtctggcagaaccgggacgtgtacctgcagggtcccatctgggccaagattcctcacacggacggcaacttccacccgtctccgctgatgggcggctttggcctgaaacatcctccgcctcagatcctgatcaagaacacgcctgtacctgcggatcctccgaccaccttcaaccagtcaaagctgaactctttcatcacgcaatacagcaccggacaggtcagcgtggaaattgaatgggagctgcagaaggaaaacagcaagcgctggaaccccgagatccagtacacctccaactactacaaatctacaagtgtggactttgctgttaatacagaaggcgtgtactctgaaccccgccccattggcacccgttacctcacccgtaatctgtaa

SEQ ID NO: 3998 - DNA, 2217 bp, Artificial Sequence
  Description of Artificial Sequence: Synthetic polynucleotide
atggctgccgatggttatcttccagattggctcgaggacaacctctctgagggcattcgcgagtggtgggcgctgaaacctggagccccgaagcccaaagccaaccagcaaaagcaggacgacggccggggtctggtgcttcctggctacaagtacctcggacccttcaacggactcgacaagggggagcccgtcaacgcggcggacgcagcggccctcgagcacgacaaggcctacgaccagcagctgcaggcgggtgacaatccgtacctgcggtataaccacgccgacgccgagtttcaggagcgtctgcaagaagatacgtcttttgggggcaacctcgggcgagcagtcttccaggccaagaagcgggttctcgaacctctcggtctggttgaggaaggcgctaagacggctcctggaaagaagagaccggtagagccatcaccccagcgttctccagactcctctacgggcatcggcaagaaaggccaacagcccgccagaaaaagactcaattttggtcagactggcgactcagagtcagttccagaccctcaacctctcggagaacctccagcagcgccctctggtgtgggacctaatacaatggctgcaggcggtggcgcaccaatggcagacaataacgaaggcgccgacggagtgggtagttcctcgggaaattggcattgcgattccacatggctgggcgacagagtcatcaccaccagcacccgaacctgggccctgcccacctacaacaaccacctctacaagcaaatctccaacgggacatcgggaggagccaccaacgacaacacctacttcggctacagcaccccctgggggtattttgactttaacagattccactgccacttttcaccacgcgactggcagcgactcatcaacaacaactggggattccggcccaagagactcagcttcaagctcttcaacatccaggtcaaggaggtcacgcagaatgaaggcaccaagaccatcgccaataacctcaccagcaccatccaggtgtttacggactcggagtaccagctgccgtacgttctcggctctgcccaccagggctgcctgcctccgttcccggcggacgtgttcatgattccccagtacggctacctaacactcaacaacggtagtcaggccgtgggacgctcctccttctactgcctggaatactttccttcgcagatgctgagaaccggcaacaacttccagtttacttacaccttcgaggacgtgcctttccacagcagctacgcccacagccagagcttggaccggctgatgaatcctctgattgaccagtacctgtactacttgtctcggactcaaacaacaggaggcacggcaaatacgcagactctgggcttcagccaaggtgggcctaatacaatggccaatcaggcaaagaactggctgccaggaccctgttaccgccaacaacgcgtctcaacgacaaccgggcaaaacaacaatagcgactttgcctggactgctgggaccaaataccatctgaatggaagaaattcattggctaatcctggcatcgctatggcaacacacaaagacgacgaggagcgtttttttcccagtaacgggatcctgatttttggcaaacaaaatgctgccagagacaatgcggattacagcgatgtcatgctcaccagcgaggaagaaatcaaaaccactaaccctgtggctacagaggaatacggtatcgtggcagataacttgcagcagcaaaacacggctcctcaaattggaactgtcaacagccagggggccttacccggtatggtctggcagaaccgggacgtgtacctgcagggtcccgtctgggccaagattcctcacacggacggcaacttccacccgtctccgctgatgggcggctttggcctgaaacatcctccgcctcagatcctgatcaagaacacgcctgtacctgcggatcctccgaccaccttcaaccagtcaaagctgaactctttcatcacgcaatacagcaccggacaggtcagcgtggaaattgaatgggagctgcagaaggaaaacagcaagcgctggaaccccgagatccagtacacctccaactactacaaatctacaagtgtggactttgctgttaatacagaaggcgtgtactctgaaccccgccccattggcacccgttacctcacccgtaatctgtaa

SEQ ID NO: 3999 - DNA, 2217 bp, Artificial Sequence
  Description of Artificial Sequence: Synthetic polynucleotide
atggctgccgatggttatcttccagattggctcgaggacaacctctctgagggcattcgcgagtggtgggcgctgaaacctggagccccgaagcccaaagccaaccagcaaaagcaggacgacggccggggtctggtgcttcctggctacaagtacctcggacccttcaacggactcgacaagggggagcccgtcaacgcggcggacgcagcggccctcgagcacgacaaggcctacgaccagcagctgcaggcgggtgacaatccgtacctgcggtataaccacgccgacgccgagtttcaggagcgtctgcaagaagatacgtcttttgggggcagcctcgggcgagcagtcttccaggccaagaagcgggttctcgaacctctcggtctggttgaggaaggcgctaagacggctcctggaaagaagagaccggtagagccatcaccccagcgttctccagactcctctacgggcatcggcaagaaaggccaacagcccgccagaaaaagactcaattttggtcagactggcgactcagagtcagttccagaccctcaacctctcggagaacctccagcagcgccctctggtgtgggacctaatacaatggctgcaggcggtggcgcaccaatggcagacaataacgaaggcgccgacggagtgggtagttcctcgggaaattggcattgcgattccacatggctgggcgacagagtcatcaccaccagcacccgaacctgggccctgcccacctacaacaaccacctctacaagcaaatctccaacgggacatcgggaggagccaccaacgacaacacctacttcggctacagcaccccctgggggtattttgactttaacagattccactgccacttttcaccacgtgactggcagcgactcatcaacaacaactggggattccggcccaagagactcagcttcaagctcttcaacatccaggtcaaggaggtcacgcagaatgaaggcaccaagaccatcgccaataacctcaccagcaccatccaggtgtttacggactcggagtaccagctgccgtacgttctcggctctgcccaccagggctgcctgcctccgttcccggcggacgtgttcatgattccccagtacggctacctaacactcaacaacggtagtcaggccgtgggacgctcctccttctactgcctggaatactttccttcgcagatgctgagaaccggcaacaacttccagtttacttacaccttcgaggacgtgcctttccacagcagctacgcccacagccagagcttggaccggctgatgaatcctctgattgaccagtacctgtactacttgtctcggactcaaacaacaggaggcacggcaaatacgcagaccctgggcttcagccaaggtgggcctaatacaatggccaatcaggcaaagaactggctgccaggaccctgttaccgccaacaacgcgtctcaacgacaaccgggcaaaacaacaatagcaactttgcctggactgctgggaccaaataccatctgaatggaagaaattcattggctaatcctggcatcgctatggcaacacacaaagacgacgaggagcgtttttttcccagtaacgggatcctgatttttggcaagcaaaatgctgccagagacaatgcggattacagcgatgtcatgctcaccagcgaggaagaaatcaaaaccactaaccctgtggctacagaggaatacggtatcgtggcagataacttgcagcagcaaaacacggctcctcaaattggaactgtcaacagccagggggccttacccggtatggtctggcagaaccgggacgtgtacctgcagggtcccatctgggccaagattcctcacacggacggcaacttccacccgtctccgctgatgggcggctttggcctaaaacatcctccgcctcagatcctgatcaagaacacgcctgtacctgcggatcctccgaccaccttcaaccagtcaaagctgaactctttcatcacgcaatacagcaccggacaggtcagcgtggaaattgaatgggagctgcagaaggaaaacagcaagcgctggaaccccgagatccagtacacctccaactactacaaatctacaagtgtggactttgctgttaatacagaaggcgtgtactctgaaccccgccccattggcacccgttacctcacccgtaatctgtaa

SEQ ID NO: 4000 - DNA, 2217 bp, Artificial Sequence
  Description of Artificial Sequence: Synthetic polynucleotide
atggctgccgatggttatcttccagattggctcgaggacaacctctctgagggcattcgcgagtggtgggcgctgaaacctggagccccgaagcccaaagccaaccagcaaaagcaggacgacggccggggtctggtgcttcctggctacaagtacctcggacccttcaacggactcgacaagggggagcccgtcaacgcggcggacgcagcggccctcgagcacgacaaggcctacgaccagcagctgcaggcgggtgacaatccgtaccagcggtataaccacgccgacgccgagtttcaggagcgtctgcaagaagatacgtcttttgggggcaacctcgggcgagcagtcttccaggccaagaagcgggttctcgaacctctcggtctggttgaggaaggcgctaagacggctcctggaaagaagagaccggtagagccatcaccccagcgttctccagactcctctacgggcatcggcaagaaaggccaacagcccgccagaaaaagactcaattttggtcagactggcgactcagagtcagttccagaccctcaacctctcggagaacctccagcagcgccctctggtgtgggacctaatacaatggctgcaggcggtggcgcaccaatggcagacaataacgaaggcgccgacggagtgggtagttcctcgggaaattggcattgcgattccgcatggctgggcgacagagtcatcaccaccagcacccgaacctgggccctgcccacctacaacaaccacctctacaagcaaatctccaacgggacatcgggaggagccaccaacgacaacacctacttcggctacagcaccccctgggggtattttgactttaacagattccactgccacttttcaccacgtgactggcagcgactcatcaacaacaactggggattccggcccaagagactcagcttcaagctcttcaacatccaggtcaaggaggtcacgcagaatgaaggcaccaagaccatcgccaataacctcaccagcaccatccaggtgtttacggactcggagtaccagctgccgtacgttctcggctctgcccaccagggctgcctgcctccgttcccggcggacgtgttcacgattccccagtacggctacctaacactcaacaacggtagtcaggccgtgggacgctcctccttctactgcctggaatactttccttcgcagatgctgagaaccggcaacaacttccagtttacttacaccttcgaggacgtgcctttccacagcagctacgcccacagccagagcttggaccggctgatgaatcctctgattgaccagtacctgtactacttgtctcggactcaaacaacaggaggcacggcaaatacgcagactctgggcttcagccaaggtgggcctaatacaatggccaatcaggcaaagaactggctgccaggaccctgttaccgccaacaacgcgtctcaacgacaaccgggcaaaacaacaatagcaactttgcctggactgctgggaccaaataccatctgaatggaagaaattcattggctaatcctggcatcgctatggcaacacacaaagacgacgaggagcgtttttttcccagtaacgggatcctgatttttggcaaacaaaatgctgccagagacaatgcggattacagcgatgtcatgctcaccagcgaggaagaaatcaaaaccactaaccctgtggctacagaggaatacggtatcgtggcagataacttgcagcagcaaaacacggctcctcaaattggaactgtcaacagccagggggccttacccggtatggtctggcagaaccgggacgtgtacctgcagggtcccatctgggccaagattcctcacacggacggcaacttccacccgtctccgctgatgggcggctttggcctgaaacatcctccgcctcagatcctgatcaagaacacgcctgtacctgcggatcctccgaccaccttcaaccagtcaaagctgaactctttcatcacgcaatacagcaccggacaggtcagcgtggaaattgaatgggagctgcagaaggaaaacagcaagcgctggaaccccgagatccagtacacctccaactactacaaatctacaagtgtggactttgctgttaatacagaaggcgtgtactctgaaccccgccccattggcacccgttacctcacccgtaatctgtaa

SEQ ID NO: 4001 - DNA, 2217 bp, Artificial Sequence
  Description of Artificial Sequence: Synthetic polynucleotide
atggctgccgatggttatcttccagattggctcgaggacaacctctctgagggcattcgcgagtggtgggcgctgaaacctggagccccgaagcccaaagccaaccagcaaaagcaggacgacggccggggtctggtgcttcctggctacaagtacctcggacccttcaacggactcgacaagggggagcccgtcaacgcggcggacacggcggccctcgagcacgacaaggcctacgaccagcagctgcaggcgggtgacaatccgtacctgcggtataaccacgccgacgccgagtttcaggagcgtctgcaagaagatacgtcttttgggggcaacctcgggcgagcagtcttccaggccaagaagcgggttctcgaacctctcggtctggttgaggaaggcgctaagacggctcctggaaagaagagaccggtagagccatcaccccagcgttctccagactcctctacgggcatcggcaagaaaggccaacagcccgccagaaaaagactcaattttggtcagactggcgactcagagtcagttccagaccctcaacctctcggagaacctccagcagcgccctctggtgtgggacctaatacaatggctgcaggcggtggcgcaccaatggcagacaataacgaaggcgccgacggagtgggtagttcctcgggaaattggcattgcgattccacatggctgggcgacagagtcatcaccaccagcacccgaacctgggccctgcccacctacaacaaccacctctacaagcaaatctccaacgggacatcgggaggagccaccaacgacaacacctacttcggctacagcaccccctgggggtattttgactttaacagattccactgccacttttcaccacgtgactggcagcgactcatcaacaacaactggggattccggcccaagagactcagcttcaagctcttcaacatccaggtcaaggaggtcacgcagaatgaaggcaccaagaccatcgccaataacctcaccagcaccatccaggtgtttacggactcggagtaccagctgccgtacgttctcggctctgcccaccagggctgcctgcctccgttcccggcggacgtgttcatgattccccagtacggctacctaacactcaacaacggtagtcaggccgtgggacgctcctccttctactgcctggaatactttccttcgcagatgctgagaaccggcaacaacttccagtttacttacaccttcgaggacgtgcctttccacagcagctacgcccacagccagagcttggaccggctgatgaatcctctgattgaccagtacctgtactacttgtctcggactcaaacaacaggaggcacggcaaatacgcagactctgggcttcagccaaggtgggcctaatacaatggccaatcaggcaaagaactggctgccaggaccctgttaccgccaacaacgcgtctcaacgacaaccgggcaaaacaacaatagcaactttgcctggactgctgggaccaaataccatctgaatggaagaaattcattggctaatcctggcatcgctatggcaacacacaaagacgacgaggagcgtttttttcccagtaacgggatcctgatttttggcaaacaaaatgctgccagagacaatgcggattacagcgatgtcatgctcaccagcgaggaagaaatcaaaaccactaaccctgtggctacagaggaatacggtatcgtggcagataacttgcagcagcaaaacacggctcctcaaattggaactgtcaacagccagggggccttacccggtatggtctggcagaaccgggacgtgtacctgcagggtcccatctgggccaagattcctcacacggacggcaacttccacccgtctccgctgatgggcggctttggcctgaaacatcctccgcctcagatcctgatcaagaacacgcctgtacctgcggatcctccgaccaccttcaaccagtcaaagctgaactctttcatcacgcaatacagcaccggacaggtcagcgtggaaattgaatgggagctgcagaaggaaaacagcaagcgctggaaccccgagatccagtacacctccaactactacaaatctacaagtgtggactttgctgttaatacagaaggcgtgtactctgaaccccgccccattggcacccgttacctcacccgtaatctgtaa

SEQ ID NO: 4002 - DNA, 2217 bp, Artificial Sequence
  Description of Artificial Sequence: Synthetic polynucleotide
atggctgccgatggttatcttccagattggctcgaggacaacctctctgagggcattcgcgagtggtgggcgctgaaacctggagccccgaagcccaaagccaaccagcaaaagcaggacgacggccggggtctggtgcttcctggctacaagtacctcggacccttcaacggactcgacaagggggagcccgtcaacgcggcggacgcagcggccctcgagcacgacaaggcctacgaccagcagctgcaggcgggtgacaatccgtacctgcggtataaccacgccgacgccgagtttcaggagcgtctgcaagaagatacgtcttttgggggcaacctcgggcgagcagtcttccaggccaagaagcgggttctcgaacctctcggtctggttgaggaaggcgctaagacggctcctggaaagaagagaccggtagagccatcaccccagcgttctccagactcctctacgggcatcggcaagaaaggccaacagcccgccagaaaaagactcaattttggtcagactggcgactcagagtcagttccagaccctcaacctctcggagaacctccagcagcgccctctggtgtgggacctaatacaatggctgcaggcggtggcgcaccaatggcagacaataacgagggcgccgacggagtgggtagttcctcgggaaattggcattgcgattccacatggctgggcgacagagtcatcaccaccagcacccgaacctgggccctgcccacctacaacaaccacctctacaagcaaatctccaacgggacatcgggaggagccaccaacgacaacacctacttcggctacagcaccccctgggggtattttgactttaacagattccactgccacttttcaccacgtgactggcagcgactcatcaacaacaactggggattccggcccaagagactcagcttcaagctcttcaacatccaggtcaaggaggtcacgcagaatgaaggcaccaagaccatcgccaataacctcaccagcaccatccaggtgtttacggactcggagtaccagctgccgtacgttctcggctctgcccaccagggctgcctgcctccgttcccggcggacgtgttcatgattccccagtacggctacctgacactcaacaacggtagtcaggccgtgggacgctcctccttctactgcctggaatactttccttcgcagatgctgagaaccggcaacaacttccagtttacttacaccttcgaggacgtgcctttccacagcagctacgcccacagccagagcttggaccggctgatgaatcctctgattgaccagtacctgtactacttgtctcggactcaaacaacaggaggcacggcaaatacgcagactctgggcttcagccaaggtgggcctaatacaatggccaatcaggcaaagaactggctgccaggaccctgttaccgccaacaacgcgtctcaacgacaaccgggcaaaacaacaatagcaactttgcctggactgctgggaccaaataccatctgaatggaagaaattcattggctaatcctggcatcgctatggcaacacacaaagacgacgaggagcgtttttttcccagtaacgggatcctgatttttggcaaacaaaatgctgccagagacaatgcggattacagcgatgtcatgctcaccagcgaggaagaaatcaaaaccactaaccctgtggctacagaggaatacggtatcgtggcagataacttgcagcagcaaaacgcggctcctcaaattggaactgtcaacagccagggggccttacccggtatggtctggcagaaccgggacgtgtacctgcagggtcccatctgggccaagattcctcacacggacggcaacttccacccgtctccgctgatgggcggctttggcctgaaacatcctccgcctcagatcctgatcaagaacacgcctgtacctgcggatcccccgaccaccttcaaccagtcaaagctgaactctttcatcacgcaatacagcaccggacaggtcagcgtggaaattgaatgggagctgcagaaggaaaacagcaagcgctggaaccccgagatccagtacacctccaactactacaaatctacaagtgtggactttgctgttaatacagaaggcgtgtactctgaaccccgccccattggcacccgttacctcacccgtaatctgtaa

SEQ ID NO: 4003 - DNA, 2217 bp, Artificial Sequence
  Description of Artificial Sequence: Synthetic polynucleotide
atggctgccgatggttatcttccagattggctcgaggacaacctctctgagggcattcgcgagtggtgggcgctgaaacctggagccccgaagcccaaagccaaccagcaaaagcaggacgacggccggggtctggtgcttcctggctacaagtacctcggacccttcaacggactcgacaagggggagcccgtcaacgcggcggacgcagcggccctcgagcacgacaaggcctacgaccagcagctgcaggcgggtgacaatccgtacctgcggtataaccacgccgacgccgagtttcaggagcgtctgcaagaagatacgtcttttgggggcaacctcgggcgagcagtcttccaggccaagaagcgggttctcgaacctctcggtctggttgaggaaggcgctaagacggctcctggaaagaagagaccggtagagccatcaccccagcgttctccagactcctctacgggcatcggcaagaaaggccaacagcccgccagaaaaagactcaattttggtcagactggcgactcagagtcagttccagaccctcaacctctcggagaacctccagcagcgccctctggtgtgggacctaatacaatggctgcaggcggtggcgcaccaatggcagacaataacgaaggcgccgacggagtgggtagttcctcgggaaattggcattgcgattccacatggctgggcgacagagtcatcaccaccagcacccgaacctgggccctgcccacctacaacaaccacctctacaagcaaatctccaacgggacatcgggaggagccaccaacgacaacacctacttcggctacagcaccccctgggggtattttgactttaacagattccactgccacttttcaccacgtgactggcagcgactcatcaacaacaactggggattccggcccaagagactcagcttcaagctcttcaacatccaggtcaaggaggtcacgcagaatgaaggcaccaagaccatcgccaataacctcaccagcaccatccaggtgtttacggactcggagtaccagctgccgtacgttctcggctctgcccaccagggctgcctgcctccgttcccggcggacgtgttcacgattccccagtacggctacctaacactcaacaacggtagtcaggccgtgggacgctcctccttctactgcctggaatactttccttcgcagatgctgagaaccggcaacaacttccagtttacttacaccttcgaggacgtgcctttccacagcagctacgcccacagccagagcttggaccggctgatgaatcctctgattgaccagtacctgtactacttgtctcggactcaaacaacaggaggcacggcaaatacgcagactctgggcttcagccaaggtgggcctaatacaatggccaatcaggcaaagaactggctgccaggaccctgttaccgccaacaacgcgtctcaacgacaaccgggcgaaacaacaatagcaactttgcctggactgctgggaccaaataccatctgaatggaagaaattcattggctaatcctggcatcgctatggcaacacacaaagacgacgaggagcgtttttttcccagtaacgggatcctgatttttggcaaacaaaatgctgccagagacaatgcggattacagcgatgtcatgctcaccagcgaggaagaaatcaaaaccactaaccctgtggctacagaggaatacggtatcgtggcagataacttgcagcagcaaaacacggctcctcaaattggaactgtcaacagccagggggccttacccggtatggtctggcagaaccgggacgtgtacctgcagggtcccatctgggccaagattcctcacacggacggcaacttccacccgtctccgctgatgggcggctttggcctgaaacatcctccgcctcagatcctgatcaagaacacgcctgtacctgcggatcctccgaccaccttcaaccagtcaaagctgaactctttcatcacgcaatacagcaccggacaggtcagcgtggaaattgaatgggagctgcagaaggaaaacagcaagcgctggaaccccgagatccagtacacctccaactactacaaatctacaagtgtggactttgctgttaatacagaaggcgtgtactctgaaccccgccccattggcacccgttacctcacccgtaatctgtaa

SEQ ID NO: 4004 - DNA, 2217 bp, Artificial Sequence
  Description of Artificial Sequence: Synthetic polynucleotide
atggctgccgatggttatcttccagattggctcgaggacaacctctctgagggcattcgcgagtggtgggcgctgaaacctggagccccgaagcccaaagccaaccagcaaaagcaggacgacggccggggtctggtgcttcctggctacaagtacctcggacccttcaacggactcgacaagggggagcccgtcaacgcggcggacgcagcggccctcgagcacgacaaggcctacgaccagcagctgcaggcgggtgacaatccgtacctgcggtataaccacgccgacgccgagtttcaggagcgtctgcaagaagatacgtcttttgggggcaacctcgggcgagcggtcttccaggccaagaagcgggttctcgaacctctcggtctggttgaggaaggcgctaagacggctcctggaaagaagagaccggtagagccatcaccccagcgttctccagactcctctacgggcatcggcaagaaaggccaacagcccgccagaaaaagactcaattttggtcagactggcgactcagagtcagttccagaccctcaacctctcggagaacctccagcagcgccctctggtgtgggacctaatacaatggctgcaggcggtggcgcaccaatggcagacaataacgaaggcgccgacggagtgggtagttcctcgggaaattggcattgcgattccacatggctgggcgacagagtcatcaccaccagcacccgaacctgggccctgcccacctacaacaaccacctctacaagcaaatctccaacgggacatcggggggagccaccaacgacaacacctacttcggctacagcaccccctgggggtattttgactttaacagattccactgccacttttcaccacgtgactggcagcgactcatcaacaacaactggggattccggcccaagagactcagcttcaagctcttcaacatccaggtcaaggaggtcacgcagaatgaaggcaccaagaccatcgccaataacctcaccagcaccatccaggtgtttacggactcggagtaccagctgccgtacgttctcggctctgcccaccagggctgcctgcctccgttcccggcggacgtgttcacgattccccagtacggctacctaacactcaacaacggtagtcaggccgtgggacgctcctccttctactgcctggaatactttccttcgcagatgctgagaaccggcaacaacttccagtttacttacaccttcgaggacgtgcctttccacagcagctacgcccacagccagagcttggaccggctgatgaatcctctgattgaccagtacctgtactacttgtctcggactcaaacaacaggaggcacggcaaatacgcagactctgggcttcagccaaggtgggcctaatacaatggccaatcaggcaaagaactggctgccaggaccctgttaccgccaacaacgcgtctcaacgacaaccgggcaaaacaacaatagcaactttgcctggactgctgggaccaaataccatctgaatggaagaaattcattggctaatcctggcatcgctatggcaacacacaaagacgacgaggagcgtttttttcccagtaacgggatcctgatttttggcaaacaaaatgctgccagagacaatgcggattacagcgatgtcgtgctcaccagcgaggaagaaatcaaaaccactaaccctgtggctacagaggaatacggtatcgtggcagataacttgcagcagcaaaacacggctcctcaaattggaactgtcaacagccagggggccttacccggtatggtctggcagaaccgggacgtgtacctgcagggtcccatctgggccaagattcctcacacggacggcaacttccacccgtctccgctgatgggcggctttggcctgaaacatcctccgcctcagatcctgatcaagaacacgcctgtacctgcggatcctccgaccaccttcaaccagtcaaagctgaactctttcatcacgcaatacagcaccggacaggtcagcgtggaaattgaatgggagctgcagaaggaaaacagcaagcgctggaaccccgagatccagtacacctccaactactacaaatctacaagtgtggactttgctgttaatacagaaggcgtgtactctgaaccccgccccattggcacccgttacctcacccgtaatctgtaa

SEQ ID NO: 4005 - DNA, 2217 bp, Artificial Sequence
  Description of Artificial Sequence: Synthetic polynucleotide
atggctgccgatggttatcttccagattggctcgaggacaacctctctgagggcattcgcgagtggtgggcactgaaacctggagccccgaagcccaaagccaaccagcaaaagcaggacgacggccggggtctggtgcttcctggctacaagtacctcggacccttcaacggactcgacaagggggagcccgtcaacgcggcggacgcagcggccctcgagcacgacaaggcctacgaccagcagctgcaggcgggtgacaatccgtacctgcggtataaccacgccgacgccgagtttcaggagcgtctgcaagaagatacgtcttttgggggcaacctcgggcgagcagtcttccaggccaagaagcgggttctcgaacctctcggtctggttgaggaaggcgctaagacggctcctggaaagaagagaccggtagagccatcaccccagcgttctccagactcctctacgggcatcggcaagaaaggccaacagcccgccagaaaaagactcaattttggtcagactggcgactcagagtcagttccagaccctcaacctctcggagaacctccagcagcgccctctggtgtgggacctaatacaatggctgcaggcggtggcgcaccaatggcagacaataacgaaggcgccgacggagtgggtagttcctcgggaaattggcattgcgattccacatggctgggcgacagagtcatcaccaccagcacccgaacctgggccctgcccacctacaacaaccacctctacaagcaaatctccaacgggacatcgggaggagccaccaacgacaacacctacttcggctacagcaccccctgggggtattttgactttaacagattccactgccacttttcaccacgtgactggcagcgactcatcaacaacaactggggattccggcccaagagactcagcttcaagctcttcaacatccaggtcaaggaggtcacgcagaatgaaggcaccaagaccatcgccaataacctcaccagcaccatccaggtgtttacggactcggagtaccagctgccgtacgttctcggctctgcccaccagggctgcctgcctccgttcccggcggacgtgttcatgattccccagtacggctacctaacactcaacaacggtagtcaggccgtgggacgctcctccttctactgcctggaatactttccttcgcagatgctgagagccggcaacaacttccagtttacttacaccttcgaggacgtgcctttccacagcagctacgcccacagccagagcttggaccggctgatgaatcctctgattgaccagtacctgtactacttgtctcggactcaaacaacaggaggcacggcaaatacgcagactctgggcttcagccaaggtgggcctaatacaatggccaatcaggcaaagaactggctgccaggaccctgttaccgccaacaacgcgtctcaacgacaaccgggcaaaacaacaatagcaactttgcctggactgctgggaccaaataccatctgaatggaagaaattcattggctaatcctggcatcgctatggcaacacacaaagacgacgaggagcgtttttttcccagtaacgggatcctgatttttggcaaacaaaatgctgccagagacaatgcggattacagcgatgtcatgctcaccagcgaggaagaaatcaaaaccactaaccctgtggctacagaggaatacggtatcgtggcagataacttgcagcagcaaaacacggctcctcaaattggaactgtcgacagccagggggccttacccggtatggtctggcagaaccgggacgtgtacctgcagggtcccatctgggccaagattcctcacacggacggcaacttccacccgtctccgctgatgggcggctttggcctgaaacatcctccgcctcagatcctgatcaagaacacgcctgtacctgcggatcctccgaccaccttcaaccagtcaaagctgaactctttcatcacgcaatacagcaccggacaggtcagcgtggaagttgaatgggagctgcagaaggaaaacagcaagcgctggaaccccgagatccagtacacctccaactactacaaatctacaagtgtggactttgctgttaatacagaaggcgtgtactctgaaccccgccccattggcacccgttacctcacccgtaatctgtaa

SEQ ID NO: 4006 - DNA, 2217 bp, Artificial Sequence
  Description of Artificial Sequence: Synthetic polynucleotide
atggctgccgatggttatcttccagattggctcgaggacaacctctctgagggcattcgcgagtggtgggcgctgaaacctggagccccgaagcccaaagccaaccagcaaaagcaggacgacggccggggtctggtgcttcctggctacaagtacctcggacccttcaacggactcgacaagggggagcccgtcaacgcggcggacgcagcggccctcgagcacgacaaggcctacgaccagcagctgcaggcgggtgacaatccgtacctgcggtataaccacgccgacgccgagtttcaggagcgtctgcaagaagatacgtcttttgggggcagcctcgggcgagcagtcttccaggccaagaagcgggttctcgaacctctcggtctggttgaggaaggcgctaagacggctcctggaaagaagagaccggtagagccatcaccccagcgttctccagactcctctacgggcatcggcaagaaaggccaacagcccgccagaaaaagactcaattttggtcagactggcgactcagagtcagttccagaccctcaacctctcggagaacctccagcagcgccctctggtgtgggacctaatacaatggctgcaggcggtggcgcaccaatggcagacaataacgaaggcgccgacggagtgggtagttcctcgggaaattggcattgcgattccacatggctgggcgacagagtcatcaccaccagcacccgaacctgggccctgcccacctacaacaaccacctctacaagcaaatctccaacgggacatcgggaggagccaccaacgacaacacctacttcggctacagcaccccctgggggtattttgactttaacagattccactgccacttttcaccacgtgactggcagcgactcatcaacaacaactggggattccggcccaagagactcagcttcaagctcttcaacatccaggtcaaggaggtcacgcagaatgaaggcaccaagaccatcgccaataacctcaccagcaccatccaggtgtttacggactcggagtaccagctgccgtacgttctcggctctgcccaccagggctgcctgcctccgttcccggcggacgtgttcatgattccccagtacggctacctaacactcaacaacggtagtcaggccgtgggacgctcctccttctactgcctggaatactttccttcgcagatgctgagaaccggcaacaacttccagtttacttacaccttcgaggacgtgcctttccacagcagctacgcccacagccagagcttggaccggctgatgaatcctctgattgaccagtacctgtactacttgtctcggactcaaacaacaggaggcacggcaaatacgcagactctgggcttcagccaaggtgggcctaatacaatggccaatcaggcaaagaactggctgccaggaccctgttaccgccaacaacgcgtctcaacgacaaccgggcaaaacaacaatagcaactttgcctggactgctgggaccaaataccatctgaatggaagaaattcattggctaatcctggcatcgctatggcaacacacaaagacgacgaggagcgtttttttcccagtaacgggatcctgatttttggcaaacaaaatgctgccagagacaatgcggattacagcgatgtcatgctcaccagcgaggaagaaatcaaaaccactaaccctgtggctacagaggaatacggtatcgtggcagataacttgcagcagcaaaacacggctcctcaaattggaactgtcaacagccagggggccttacccggtatggtctggcagaaccgggacgtgtacctgcagggtcccatctgggccaagattcctcacacggacggcaacttccacccgtctccgctgatgggcggctttggcctgaaacatcctccgcctcagatcctgatcaagaacacgcctgtacctgcggatcctccgaccaccttcaaccagtcaaagctgaactctttcatcacgcaatacagcaccggacaggtcagcgtggaaattgaatgggagctgcagaaggaaaacagcaagcgctggaaccccgagatccagtacacctccaactactacaaatctacaagtgtggactttgctgttaatacagaaggcgtgtactctgaaccccgccccattggcacccgtcacctcacccgtaatctgtaa

SEQ ID NO: 4007 - DNA, 2217 bp, Artificial Sequence
  Description of Artificial Sequence: Synthetic polynucleotide
atggctgccgatggttatcttccagattggctcgaggacaacctctctgagggcattcgcgagtggtgggcgctgaaacctggagccccgaagcccaaagccaaccagcaaaagcaggacgacggccggggtctggtgcttcctggctacaagtacctcggacccttcaacggactcgacaagggggagcccgtcaacgcggcggacgcagcggccctcgagcacgacaaggcctacgaccagcagctgcaggcgggtgacaatccgtacctgcggtataaccacgccgacgccgagtttcaggagcgtctgcaagaagatacgtcttttgggggcaacctcgggcgagcagtcttccaggccaagaagcgggttctcgaacctctcggtctggttgaggaaggcgctaagacggctcctggaaagaagagaccggtagagccatcaccccagcgttctccagactcctctacgggcatcggcaagaaaggccaacagcccgccagaaaaagactcaattttggtcagactggcgactcagagtcagttccagaccctcaacctctcggagaacctccagcagcgccctctggtgtgggacctaatacaatggctgcaggcggtggcgcaccaatggcagacaataacgaaggcgccgacggagtgggtagttcctcgggaaattggcattgcgattccacatggctgggcgacagagtcatcaccaccagcacccgaacctgggccctgcccacctacaacaaccacctctacaagcaaatctccaacgggacatcgggaggagccaccaacgacaacacctacttcggctacagcaccccctgggggtattttgactttaacagattccactgccacttttcaccacgtgactggcagcgactcatcaacaacaactggggattccggcccaagagactcagcttcaagctcttcaacatccaggtcaaggaggtcacgcagaatgaaggcaccaagaccatcgccaataacctcaccagcaccatccaggtgtttacggactcggagtaccagctgccgtacgttctcggctctgcccaccagggctgcctgcctccgttcccggcggacgtgttcacgattccccagtacggctacctaacactcaacaacggtagtcaggccgtgggacgctcctccttctactgcctggaatactttccttcgcagatgctgagaaccggcaacaacttccagtttacttacaccttcgaggacgtgcctttccacagcagctacgcccacagccagagcttggaccggctgatgaatcctctgattgaccagtacctgtactacttgtctcggactcaaacaacaggaggcacggcaaatacgcagactctgggcttcagccaaggtgggcctaatacaatggccaatcaggcaaagaactggctgccaggaccctgttaccgccaacaacgcgtctcaacgacaaccgggcaaaacaacaatagcaactttgcctggactgctgggaccaaataccatctgaatggaagaaattcattggctaatcctggcatcgctatggtaacacacaaagacgacgaggagcgtttttttcccagtaacgggatcctgatttttggcaaacaaaatgctgccagagacaatgcggattacagcgatgtcatgctcaccagcgaggaagaaatcaaaaccactaaccctgtggctacagaggaatacggtatcgtggcagataacttgcagcagcaaaacacggctcctcaaattggaactgtcaacagccagggggccttacccggtatggtctggcagaaccgggacgtgtacctgcagggtcccatctgggccaagattcctcacacggacggcaacttccacccgtctccgctgatgggcggctttggcctgaaacatcctccgcctcagatcctgatcaagaacacgcctgtacctgcggatcctccgaccaccttcaaccagtcaaagctgaactctttcatcacgcaatacagcaccggacaggtcagcgtggaaattgaatgggagctgcagaaggaaaacagcaagcgctggaaccccgagatccagtacacctccaactactacaaatctacaagtgtggactttgctgttaatacagaaggcgtgtactctgaaccccgccccattggcacccgttacctcacccgtaatctgtaa

SEQ ID NO: 4008 - protein, 734 aa, Artificial Sequence
  Description of Artificial Sequence: Synthetic polypeptide
MAADGYLPDWLEDTLSEGIRQWWKLKPGPPPPKPAERHKDDSRGLVLPGYKYLGPFNGLDKGEPVNEADAAALEHDKAYDRQLDSGDNPYLKYNHADAEFQERLKEDTSFGGNLGRAVFQAKKRVLEPLGLVEEPVKTAPGKKRPVEHSPVEPDSSSGTGKAGQQPARKRLNFGQTGDADSVPDPQPLGQPPAAPSGLGTNTMATGSGAPMADNNEGADGVGNSSGNWHCDSTWMGDRVITTSTRTWALPTYNNHLYKQISSQSGASNDNHYFGYSTPWGYFDFNRFHCHFSPRDWQRLINNNWGFRPKRLNFKLFNIQVKEVTQNDGTTTIANNLTSTVQVFTDSEYQLPYVLGSAHQGCLPPFPADVFMVPQYGYLTLNNGSQAVGRSSFYCLEYFPSQMLRTGNNFTFSYTFEDVPFHSSYAHSQSLDRLMNPLIDQYLYYLSRTHSNSGTHQQSRLQFSQAGASMSGPARNWLPGPCYRQQRVSKQSADNNNSEYSWTGATKYHLNGRDSLVNPGPAMASHKDDEEKFFLMSGVLIFGKQGSDENNVDIEKVMITDEEEIRTTNPVATEQYGSVSTNLQEAKTSPATADVNHQGVLPGMVWQDRDVYLQGPIWAKIPHTDGHFHPSPLMGGFGLKHPPPQILIKNTPVPANPSTTFSAAKFASFITQYSTGQASVEIEWELQKENSKRWNPEIQYTSNYNKSVNVDFTVDTNGVYSEPRPIGTRYLTRNL

SEQ ID NO: 4009 - protein, 734 aa, Artificial Sequence
  Description of Artificial Sequence: Synthetic polypeptide
MAADGYLPDWLEDTLSEGIRQWWKLKPGPPPPKPAERHKDDSRGLVLPGYKYLGPFNGLDKGEPVNEADAAALEHDKAYDRQLDSGDNPYLKYNHADAEFQERLKEDTSFGGNLGRAVFQAKKRVLEPLGLVEEPVKTAPGKKRPVEHSPVEPDSSSGTGKAGQQPARKRLNFGQTGDADSVPDPQPLGQPPAAPTSLGSTTMATGSGAPMADNNEGADGVGNSSGNWHCDSQWLGDRVITTSTRTWALPTYNNHLYKQISSQSGASNDNHYFGHSTPWGYFDFNRFHCHFSPRDWQRLINNNWGFRPKRLNFKLFNIQVKEVTQNDGTTTIANNLTSTVQVFTDSEYQLPYVLGSAHQGCLPPFPADVFMVPQYGYLTLNNGSQAVGRSSFYCLEYFPSQMLRTGNNFTFSYTFEDVPFHSSYAHSQSLDRLMNPLIDQYLYYLSRTHSNSGTHQQSRLQFSQAGASMSGPARNWLPGPCYRQQRVSKQSADNNNSEYSWTGATKYRLNGRDSLVNPGSAMASHKDDEEKFFLMSGVLIFGKQGSDENNVDIEKVMITDEEEIRTTNPVATEQYGSVSTNLQEAKTSPATADVNHQGVLPGMVWQDRDVYLQGPIWAKIPHTDGHFHPSPLMGGFGLKHPPPQILIKNTPVPANPSTTFSAAKFASFITQYSTGQVSVEIEWELQKENSKRWNPEIQYTSNYNKSVNVDFTVDTNGVYSEPRPIGTRYLTRNL

SEQ ID NO: 4010 - protein, 734 aa, Artificial Sequence
  Description of Artificial Sequence: Synthetic polypeptide
MAADGYLPDWLEDTLSEGIRQWWKLKPGPPPPKPAERHKDDSRGLVLPGYKYLGPFNGLDKGEPVNEADAAALEHDKAYDRQLDSGDNPYLKYNHADAEFQERLKEDTSFGGNLGRAVFQAKKRVLEPLGLVEEPVKTAPGKKRPVEHSPVEPDSSSGTGKAGQQPARKRLNFGQTGDADSVPDPQPLGQPPAAPSGLGTNTMATGSGAPMADNNEGADGVGNSSGNWHCDSTWMGDRVITTSTRTWALPTYNNHLYKQISSQSGASNDNHYFGYSTPWGYFDFNRFHCHFSPRDWQRLINNNWGFRPKRLNFKLFNIQVKEVTQNDGTTTIANNLTSTVQVFTDSEYQLPYVLGSAHQGCLPPFPADVFMVPQYGYLTLNNGSQAVGRSSFYCLEYFPSQMLRTGNNFTFSYTFEDVPFHSSYAHSQSLDRLMNPLIDQYLYYLSRTHSNSGTHQQSRLQFSQAGASMSGPARNWLPGPCYRQQRVSKQSADNNNSEYSWTGATKYRLNGRDSLVNPGSAMASHKDDEEKFFLMSGVLIFGKQGSDENNVDIEKVMITDEEEIRTTNPVATEQYGSVSTNLQEAKTSPATADVNHQGVLPGMVWQDRDVYLQGPIWAKIPHTDGHFHPSPLMGGFGLKHPPPQILIKNTPVPANPSTTFSAAKFASFITQYSTGQVSVEIEWELQKENSKRWNPEIQYTSNYNKSVNVDFTVDTNGVYSEPRPIGTRYLTRNL

SEQ ID NO: 4011 - protein, 734 aa, Artificial Sequence
  Description of Artificial Sequence: Synthetic polypeptide
MAADGYLPDWLEDTLSEGIRQWWKLKPGPPPPKPAERHKDDSRGLVLPGYKYLGPFNGLDKGEPVNEADAAALEHDKAYDRQLDSGDNPYLKYNHADAEFQERLKEDTSFGGNLGRAVFQAKKRVLEPLGLVEEPVKTAPGKKRPVEHSPVEPDSSSGTGKAGQQPARKRLNFGQTGDADSVPDPQPLGQPPAAPTSLGSTTMATGSGAPMADNNEGADGVGNSSGNWHCDSQWLGDRVITTSTRTWALPTYNNHLYKQISSQSGASNDNHYFGHSTPWGYFDFNRFHCHFSPRDWQRLINNNWGFRPKRLNFKLFNIQVKEVTQNDGTTTIANNLTSTVQVFTDSEYQLPYVLGSAHQGCLPPFPADVFMVPQYGYLTLNNGSQAVGRSSFYCLEYFPSQMLRTGNNFTFSYTFEDVPFHSSYAHSQSLDRLMNPLIDQYLYYLSRTHSNSGTHQQSRLQFSQAGASMSGPARNWLPGPCYRQQRVSKQSADNNNSEYSWTGATKYHLNGRDSLVNPGPAMASHKDDEEKFFLMSGVLIFGKQGSDENNVDIEKVMITDEEEIRTTNPVATEQYGSVSTNLQEAKTSPATADVNHQGVLPGMVWQDRDVYLQGPIWAKIPHTDGHFHPSPLMGGFGLKHPPPQILIKNTPVPANPSTTFSAAKFASFITQYSTGQASVEIEWELQKENSKRWNPEIQYTSNYNKSVNVDFTVDTNGVYSEPRPIGTRYLTRNL

SEQ ID NO: 4012 - protein, 734 aa, Artificial Sequence
  Description of Artificial Sequence: Synthetic polypeptide
MAADGYLPDWLEDTLSEGIRQWWKLKPGPPPPKPAERHKDDSRGLVLPGYKYLGPFNGLDKGEPVNEADAAALEHDKAYDRQLDSGDNPYLKYNHADAEFQERLKEDTSFGGNLGRAVFQAKKRVLEPLGLVEEPVKTAPGKKRPVEHSPVEPDSSSGTGKAGQQPARKRLNFGQTGDADSVPDPQPLGQPPAAPTSLGSTTMATGSGAPMADNNEGADGVGNSSGNWHCDSQWLGDRVITTSTRTWALPTYNNHLYKQISSQSGASNDNHYFGYSTPWGYFDFNRFHCHFSPRDWQRLINNNWGFRPKRLNFKLFNIQVKEVTQNDGTTTIANNLTSTVQVFTDSEYQLPYVLGSAHQGCLPPFPADVFMVPQYGYLTLNNGSQAVGRSSFYCLEYFPSQMLRTGNNFTFSYTFEDVPFHSSYAHSQSLDRLMNPLIDQYLYYLSRTHSNSGTHQQSRLQFSQAGASMSGPARNWLPGPCYRQQRVSKQSADNNNSEYSWTGATKYRLNGRDSLVNPGSAMASHKDDEEKFFLMSGVLIFGKQGSDENNVDIEKVMITDEEEIRTTNPVATEQYGSVSTNLQEAKTSPATADVNHQGVLPGMVWQDRDVYLQGPIWAKIPHTDGHFHPSPLMGGFGLKHPPPQILIKNTPVPANPSTTFSAAKFASFITQYSTGQVSVEIEWELQKENSKRWNPEIQYTSNYNKSVNVDFTVDTNGVYSEPRPIGTRYLTRNL

SEQ ID NO: 4013 - protein, 734 aa, Artificial Sequence
  Description of Artificial Sequence: Synthetic polypeptide
MAADGYLPDWLEDTLSEGIRQWWKLKPGPPPPKPAERHKDDSRGLVLPGYKYLGPFNGLDKGEPVNEADAAALEHDKAYDRQLDSGDNPYLKYNHADAEFQERLKEDTSFGGNLGRAVFQAKKRVLEPLGLVEEPVKTAPGKKRPVEHSPVEPDSSSGTGKAGQQPARKRLNFGQTGDADSVPDPQPLGQPPAAPSGLGTNTMATGSGAPMADNNEGADGVGNSSGNWHCDSTWMGDRVITTSTRTWALPTYNNHLYKQISSQSGASNDNHYFGYSTPWGYFDFNRFHCHFSPRDWQRLINNNWGFRPKRLNFKLFNIQVKEVTQNDGTTTIANNLTSTVQVFTDSEYQLPYVLGSAHQGCLPPFPADVFMVPQYGYLTLNNGSQAVGRSSFYCLEYFPSQMLRTGNNFTFSYTFEDVPFHSSYAHSQSLDRLMNPLIDQYLYYLSRTHSNSGTHQQSRLQFSQAGASMSGPARNWLPGPCYRQQRVSKQSADNNNSEYSWTGATKYRLNGRDSLVNPGSAMASHKDDEEKFFLMSGVLIFGKQGSDENNVDIEKVMITDEEEIRTTNPVATEQYGSVSTNLQEAKTSPATADVNHQGVLPGMVWQDRDVYLQGPIWAKIPHTDGHFHPSPLMGGFGLKHPPPQILIKNTPVPANPSTTFSAAKFASFITQYSTGQASVEIEWELQKENSKRWNPEIQYTSNYNKSVNVDFTVDTNGVYSEPRPIGTRYLTRNL

SEQ ID NO: 4014 - protein, 734 aa, Artificial Sequence
  Description of Artificial Sequence: Synthetic polypeptide
MAADGYLPDWLEDTLSEGIRQWWKLKPGPPPPKPAERHKDDSRGLVLPGYKYLGPFNGLDKGEPVNEADAAALEHDKAYDRQLDSGDNPYLKYNHADAEFQERLKEDTSFGGNLGRAVFQAKKRVLEPLGLVEEPVKTAPGKKRPVEHSPVEPDSSSGTGKAGQQPARKRLNFGQTGDADSVPDPQPLGQPPAAPTSLGSTTMATGSGAPMADNNEGADGVGNSSGNWHCDSTWMGDRVITTSTRTWALPTYNNHLYKQISSQSGASNDNHYFGYSTPWGYFDFNRFHCHFSPRDWQRLINNNWGFRPKRLNFKLFNIQVKEVTQNDGTTTIANNLTSTVQVFTDSEYQLPYVLGSAHQGCLPPFPADVFMVPQYGYLTLNNGSQAVGRSSFYCLEYFPSQMLRTGNNFTFSYTFEDVPFHSSYAHSQSLDRLMNPLIDQYLYYLSRTHSNSGTHQQSRLQFSQAGASMSGPARNWLPGPCYRQQRVSKQSADNNNSEYSWTGATKYRLNGRDSLVNPGSAMASHKDDEEKFFLMSGVLIFGKQGSDENNVDIEKVMITDEEEIRTTNPVATEQYGSVSTNLQEAKTSPATADVNHQGVLPGMVWQDRDVYLQGPIWAKIPHTDGHFHPSPLMGGFGLKHPPPQILIKNTPVPANPSTTFSAAKFASFITQYSTGQVSVEIEWELQKENSKRWNPEIQYTSNYNKSVNVDFTVDTNGVYSEPRPIGTRYLTRNL

SEQ ID NO: 4015 - protein, 734 aa, Artificial Sequence
  Description of Artificial Sequence: Synthetic polypeptide
MAADGYLPDWLEDTLSEGIRQWWKLKPGPPPPKPAERHKDDSRGLVLPGYKYLGPFNGLDKGEPVNEADAAALEHDKAYDRQLDSGDNPYLKYNHADAEFQERLKEDTSFGGNLGRAVFQAKKRVLEPLGLVEEPVKTAPGKKRPVEHSPVEPDSSSGTGKAGQQPARKRLNFGQTGDADSVPDPQPLGQPPAAPSGLGTNTMATGSGAPMADNNEGADGVGNSSGNWHCDSTWMGDRVITTSTRTWALPTYNNHLYKQISSQSGASNDNHYFGYSTPWGYFDFNRFHCHFSPRDWQRLINNNWGFRPKRLNFKLFNIQVKEVTQNGGTTTIANNLTSTVQVFTDSEYQLPYVLGSAHQGCLPPFPADVFMVPQYGYLTLNNGSQAVGRSSFYCLEYFPSQMLRTGNNFTFSYTFEDVPFHSSYAHSQSLDRLMNPLIDQYLYYLSRTHSNSGTHQQSRLQFSQAGASMSGPARNWLPGPCYRQQRVSKQSADNNNSEYSWTGATKYRLNGRDSLVNPGSAMASHKDDEEKFFLMSGVLIFGKQGSDENNVDIEKVMITDEEEIRTTNPVATEQYGSVSTNLQEAKTSPATADVNHQGVLPGMVWQDRDVYLQGPIWAKIPHTDGHFHPSPLMGGFGLKHPPPQILIKNTPVPANPSTTFSAAKFASFITQYSTGQVSVEIEWELQKENSKRWNPEIQYTSNYNKSVNVDFTVDTNGVYSEPRPIGTRYLTRNL

SEQ ID NO: 4016 - protein, 735 aa, Artificial Sequence
  Description of Artificial Sequence: Synthetic polypeptide
MAADGYLPDWLEDTLSEGIRQWWKLKPGPPPPKPAERHKDDSRGLVLPGYKYLGPFNGLDKGEPVNEADAAALEHDKAYDRQLDSGDNPYLKYNHADAEFQERLKEDTSFGGNLGRAVFQAKKRVLEPLGLVEEPVKTAPGKKRPVEHSPVEPDSSSGTGKAGQQPARKRLNFGQTGDADSVPDPQPLGQPPAAPSGLGTNTMATGSGAPMADNNEGADGVGNSSGNWHCDSTWMGDRVITTSTRTWALPTYNNHLYKQISSQSGASNDNHYFGYSTPWGYFDFNRFHCHFSPRDWQRLINNNWGFRPKRLNFKLFNIQVKEVTQNDGTTTIANNLTSTVQVFTDSEYQLPYVLGSAHQGCLPPFPADVFMVPQYGYLTLNNGSQAVGRSSFYCLEYFPSQMLRTGNNFTFSYTFEDVPFHSSYAHSQSLDRLMNPLIDQYLYYLSRTNTPSGTTTQSRLQFSQAGASDIRDQSRNWLPGPCYRQQRVSKTSADNNNSEYSWTGATKYHLNGRDSLVNPGPAMASHKDDEEKFFPQSGILIFGKQGSEKTNVDIEKVMITDEEEIRTTNPVATEQYGSVSTNLQRGNRQAATADVNTQGVLPGMVWQDRDVYLQGPIWAKIPHTDGHFHPSPLMGGFGLKHPPPQILIKNTPVPANPSTTFSAAKFASFITQYSTGQVSVEIEWELQKENSKRWNPEIQYTSNYNKSVNVDFTVDTNGVYSEPRPIGTRYLTRNL

SEQ ID NO: 4017 - protein, 735 aa, Artificial Sequence
  Description of Artificial Sequence: Synthetic polypeptide
MAADGYLPDWLEDTLSEGIRQWWKLKPGPPPPKPAERHKDDSRGLVLPGYKYLGPFNGLDKGEPVNEADAAALEHDKAYDRQLDSGDNPYLKYNHADAEFQERLKEDTSFGGNLGRAVFQAKKRVLEPLGLVEEPVKTAPGKKRPVEHSPVEPDSSSGTGKAGQQPARKRLNFGQTGDADSVPDPQPLGQPPAAPSGLGTNTMATGSGAPMADNNEGADGVGNSSGNWHCDSTWMGDRVITTSTRTWALPTYNNHLYKQISSQSGASNDNHYFGYSTPWGYFDFNRFHCHFSPRDWQRLINNNWGFRPKRLNFKLFNIQVKEVTQNDGTTTIANNLTSTVQVFTDSEYQLPYVLGSAHQGCLPPFPADVFMVPQYGYLTLNNGSQAVGRSSFYCLEYFPSQMLRTGNNFTFSYTFEDVPFHSSYARSQSLDRLMNPLIDQYLYYLSRTNTPSGTTTQSRLQFSQAGASDIRDQSRNWLPGPCYRQQRVSKTSADNNNSEYSWTGATKYHLNGRDSLVNPGPAMASHKDDEEKFFPQSGVLIFGKQGSEKTNVDIEKVMITDEEEIRTTNPVATEQYGSVSTNLQRGNRQAATADVNTQGVLPGMVWQDRDVYLQGPIWAKIPHTDGHFHPSPLMGGFGLKHPPPQILIKNTPVPANPSTTFSAAKFASFITQYSTGQVSVEIEWELQKENSKRWNPEIQYTSNYNKSVNVDFTVDTNGVYSEPRPIGTRYLTRNL

SEQ ID NO: 4018 - protein, 735 aa, Artificial Sequence
  Description of Artificial Sequence: Synthetic polypeptide
MAADGYLPDWLEDTLSEGIRQWWKLKPGPPPPKPAERHKDDSRGLVLPGYKYLGPFNGLDKGEPVNEADAAALEHDKAYDRQLDSGDNPYLKYNHADAEFQERLKEDTSFGGNLGRAVFQAKKRVLEPLGLVEEPVKTAPGKKRPVEHSPVEPDSSSGTGKAGQQPARKRLNFGQTGDADSVPDPQPLGQPPAAPSGLGTNTMATGSGAPMADNNEGADGVGNSSGNWHCDSTWMGDRVITTSTRTWALPTYNNHLYKQISSQSGASNDNHYFGYSTPWGYFDFNRFHCHFSPRDWQRLINNNWGFRPKRLNFKLFNIQVKEVTQNDGTTTIANNLTSTVQVFTDSEYQLPYVLGSAHQGCLPPFPADVFMVPQYGYLTLNNGSQAVGRSSFYCLEYFPSQMLRTGNNFTFSYTFEDVPFHSSYAHSQSLDRLMNPLIDQYLYYLSRTNTPSGTTTQSRLQFSQAGASDIRDQSRNWLPGPCYRQQRVSKTSADNNNSEYSWTGVTKYHLNGRDSLVNPGPAMASHKDDEEKFFPQSGVLIFGKQGSEKTNVDIEKVMITDEEEIRTTNPVATEQYGSVSTNLQRGNRQAATADVNTQGVLPGMVWQDRDVYLQGPIWAKIPHTDGHFHPSPLMGGFGLKHPPPQILIKNTPVPANPSTTFSAAKFASFITQYSTGQVSVEIEWELQKENSKRWNPEIQYTSNYNKSVNVDFTVDTNGVYSEPRPIGTRYLTRNL

SEQ ID NO: 4019 - protein, 735 aa, Artificial Sequence
  Description of Artificial Sequence: Synthetic polypeptide
MAADGYLPDWLEDTLSEGIRQWWKLKPGPPPPKPAERHKDDSRGLVLPGYKYLGPFNGLDKGEPVNEADAAALEHDKAYDRQLDSGDNPYPKYNHADAEFQERLKEDTSFGGNLGRAVFQAKKRVLEPLGLVEEPVKTAPGKKRPVEHSPVEPDSSSGTGKAGQQPARKRLNFGQTGDADSVPDPQPLGQPPAAPSGLGTNTMATGSGAPMADNNEGADGVGNSSGNWHCDSTWMGDRVITTSTRTWALPTYNNHLYKQISSQSGASNDNHYFGYSTPWGYFDFNRFHCHFSPRDWQRLINNNWGFRPKRLNFKLFNIQVKEVTQNDGTTTIANNLTSTVQVFTDSEYQLPYVLGSAHQGCLPPFPADVFMVPQYGYLTLNNGSQAVGRSSFYCLEYFPSQMLRTGNNFTFSYTFEDVPFHSSYAHSQSLDRLMNPLIDQYLYYLSRTNTPSGTTTQSRLQFSQAGASDIRDQSRNWLPGPCYRQQRVSKTSADNNNSEYSWTGATKYHLNGRDSLVNPGPAMASHKDDEEKFFPQSGVLIFGKQGSEKTNVDIEKVMITDEEEIRTTNPVATEQYGSVSTNLQRGNRQAATADVNTQGVLPGMVWQDRDVYLQGPIWAKIPHTDGHFHPSPLMGGFGLKHPPPQILIKNTPVPANPSTTFSAAKFASFITQYSTGQVSVEIEWELQKENSKRWNPEIQYTSNYNKSVNVDFTVDTNGVYSEPRPIGTRYLTRNL

SEQ ID NO: 4020 - protein, 735 aa, Artificial Sequence
  Description of Artificial Sequence: Synthetic polypeptide
MAADGYLPDWLEDTLSEGIRQWWKLKPGPPPPKPAERHKDDSRGLVLPGYKYLGPFNGLDKGEPVNEADAAALEHDKAYDRQLDSGDNPYLKYNHADAEFQERLKEDTSFGGNLGRAVFQAKKRVLEPLGLVEEPVKTAPGKKRPVEHSPVEPDSSSGTGKAGQQPARKRLNFGQTGDADSVPDPQPLGQPPAAPSGLGTNTMATGSGAPMADNNEGADGVGNSSGNWHCDSTWMGDRVITTSTRTWALPTYNNHLYKQISSQSGASNDNHYFGYSTPWGYFDFNRFHCHFSPRDWQRLINNNWGFRPKRLNFKLFNIQVKEVTQNDGTTTIANNLTSTVQVFTDSEYQLPYVLGSAHQGCLPPFPADVFMVPQYGYLTLNNGSQAVGRSSFYCLEYFPSQMLRTGNNFTFSYTFEDVPFHSSYAHSQSLDRLMNPLIDQYLYYLSRTNTPSGTTTQSRLQFSQAGASDIRDQSRNWLPGPCYRQQRVSKTSADNNNSEYSWTGATKYHLNGRDSLVNPGPAMASHKDDEEKFFPQSGVPIFGKQGSEKTNVDIEKVMITDEEEIRTTNPVATEQYGSVSTNLQRGNRQAATADVNTQGVLPGMVWQDRDVYLQGPIWAKIPHTDGHFHPSPLMGGFGLKHPPPQILIKNTPVPANPSTTFSAAKFASFITQYSTGQVSVEIEWELQKENSKRWNPEIQYTSNYNKSVNVDFTVDTNGVYSEPRPIGTRYLTRNL

SEQ ID NO: 4021 - protein, 735 aa, Artificial Sequence
  Description of Artificial Sequence: Synthetic polypeptide
MAADGYLPDWLEDTLSEGIRQWWKLKPGPPPPKPAERHKDDSRGLVLPGYKYLGPFNGLDKGEPVNEADAAALEHDKAYDRQLDSGDNPYLKYNHADAEFQERLKEDTSFGGNLGRAVFQAKKRVLEPLGLVEEPVKTAPGKKRPVEHSPVEPDSSSGTGKAGQQPARKRLNFGQTGDADSVPDPQPLGQPPAAPSGLGTNTMATGSGAPMADNNEGADGVGNSSGNWHCDSTWMGDRVITTSTRTWALPTYNNHLYKQISSQSGASNDNHYFGYSTPWGYFDFNRFHCHFSPRDWQRLINNNWGFRPRRLNFKLFNIQVKEVTQNDGTTTIANNLTSTVQVFTDSEYQLPYVLGSAHQGCLPPFPADVFMVPQYGYLTLNNGSQAVGRSSFYCLEYFPSQMLRTGNNFTFSYTFEDVPFHSSYAHSQSLDRLMNPLIDQYLYYLSRTNTPSGTTTQSRLQFSQAGASDIRDQSRNWLPGPCYRQQRVSKTSADNNNSEYSWTGATKYHLNGRDSLVNPGPAMASHKDDEEKFFPQSGVLIFGKQGSEKTNVDIEKVMITDEEEIRTTNPVATEQYGSVSTNLQRGNRQAATADVNTQGVLPGMVWQDRDVYLQGPIWAKIPHTDGHFHPSPLMGGFGLKHPPPQILIKNTPVPANPSTTFSAAKFASFITQYSTGQVSVEIEWELQKENSKRWNPEIQYTSNYNKSVNVDFTVDTNGVYSEPRPIGTRYLTRNL

SEQ ID NO: 4022 - protein, 735 aa, Artificial Sequence
  Description of Artificial Sequence: Synthetic polypeptide
MAADGYLPDWLEDTLSEGIRQWWKLKPGPPPPKPAERHKDDSRGLVLPGYKYLGPFNGLDKGEPVNEADAAALEHDKAYDRQLDSGDNPYLKYNHADAEFQERLKEDTSFGGNLGRAVFQAKKRVLEPLGLVEEPVKTAPGKKRPVEHSPVEPDSSSGTGKAGQQPARKRLNFGQTGDADSVPDPQPLGQPPAAPPGLGTNTMATGSGAPMADNNEGADGVGNSSGNWHCDSTWMGDRVITTSTRTWALPTYNNHLYKQISSQSGASNDNHYFGYSTPWGYFDFNRFHCHFSPRDWQRLINNNWGFRPKRLNFKLFNIQVKEVTQNDGTTTIANNLTSTVQVFTDSEYQLPYVLGSAHQGCLPPFPADVFMVPQYGYLTLNNGSQAVGRSSFYCLEYFPSQMLRTGNNFTFSYTFEDVPFHSSYAHSQSLDRLMNPLIDQYLYYLSRTNTPSGTTTQSRLQFSQAGASDIRDQSRNWLPGPCYRQQRVSKTSADNNNSEYSWTGATKYHLNGRDSLVNPGPAMASHKDDEEKFFPQSGVLIFGKQGSEKTNVDIEKVMITDEEEIRTTNPVATEQYGSVSTNLQRGNRQAATADVNTQGVLPGMVWQDRDVYLQGPIWAKIPHTDGHFHPSPLMGGFGLKHPPPQILIKNTPVPANPSTTFSAAKFASFITQYSTGQVSVEIEWELQKENSKRWNPEIQYTSNYNKSVNVDFTVDTNGVYSEPRPIGTRYLTRNL

SEQ ID NO: 4023 - protein, 735 aa, Artificial Sequence
  Description of Artificial Sequence: Synthetic polypeptide
MAADGYLPDWLEDTLSEGIRQWWKLKPGPPPPKPAERHKDDSRGLVLPGYKYLGPFNGLDKGEPVNEADAAALEHDKAYDRQLDSGDNPYLKYNHADAEFQERLKEDTSFGGNLGRAVFQAKKRVLEPLGLVEEPVKTAPGKKRPVEHSPVEPDSSSGTGKAGQQPARKRLNFGQTGDADSVPDPQPLGQPPAAPSGLGTNTMATGSGAPMADNNEGADGVGNSSGNWHCDSTWMGDRVITTSTRTWALPTYNNHLYKQISSQSGASNDNHYFGYSTPWGYFDFNRFHCHFSPRDWQRLINNNWGFRPKRLNFKLFNIQVKEVTQNDGTTTIANNLTSTVQVFTDSEYQLPYVLGSAHQGCLPPFPADVFMVPQYGYLTLNNGSQAVGRSSFYCLEYFPSQMLRTGNNFTFSYTFEDVPFHSSYAHSQSLDRLMNPLIDQYLYYLSRTNTPSGTTTQSRLQFSQAGASDIRDQSRNWLPGPCYRQQRVSKTSADNNNSEYSWTGATKYHLNGRDSLVNPGPAMASHKDDEEKFFPQSGVLIFGKQGSEKTNVDIEKVMITDEEEIRTTNPVATEQYGSVSTNLQRGNRQAATADVNTQGVLPGMVWQDRDVYLQGPIWAKIPHTDGHFHPSPLMGGFGLKHPPPQILIKNTPVPANPSTTFSAAKFASFITQYSTGQVSVEIEWELQKENSKRWNPEIQCTSNYNKSVNVDFTVDTNGVYSEPRPIGTRYLTRNL

SEQ ID NO: 4024 - protein, 735 aa, Artificial Sequence
  Description of Artificial Sequence: Synthetic polypeptide
MAADGYLPDWLEDTLSEGIRQWWKLKPGPPPPKPAERHKDDSRGLVLPGYKYLGPFNGLDKGEPVNEADAAALEHDKAYDRQLDSGDNPYLKYNHADAEFQERLKEDTSFGGNLGRAVFQAKKRVLEPLGLVEEPVKTAPGKKRPVEHSPVEPDSSSGTGKAGQQPARKRLNFGQTGDADSVPDPQPLGQPPAAPSGLGTNTMATGSGAPMADNNEGADGVGNSSGNWHCDSTWMGDRVITTSTRTWALPTYNNHLYKQISSQSGASNDNHYFGYSTPWGYFDFNRFHCHFSPRDWQRLINNNWGFRPKRLNFKLFNIQVKEVTQNDGTTTIANNLTSTVQVFTDSEYQLPYVLGSAHQGCLPPFPADVFMVPQYGYLTLNNGSQAVGRSSFYCLEYFPSQMLRTGNNFTFSYTFEDVPFHSSYAHSQSLDRLMNPLIDQYLYYLSRTNTPSGTTTQSRLQFSQAGASDIRDQSRNWLPGPCYRQQRVSKTSADNNNSEYSWTGATKYHLNGRDSLVNPGPAMASHKDDEEKFFPQSGVLIFGKQGSEKTNVDIEKVMITDEEEIRTTNPVATEQYGSVSTNLQRGNRQAATADVNTQGVLPGMVWQDRDVYLQGPIWAKIPHTDGHFHPSPLMGGFGLKHPPPQILIKNTPVPANPSTTFSAAKFASFITRYSTGQVSVEIEWELQKENSKRWNPEIQYTSNYNKSVNVDFTVDTNGVYSEPRPIGTRYLTRNL

SEQ ID NO: 4025 - protein, 735 aa, Artificial Sequence
  Description of Artificial Sequence: Synthetic polypeptide
MAADGYLPDWLEDTLSEGIRQWWKLKPGPPPPKPAERHKDDSRGLVLPGYKYLGPFNGLDKGEPVNEADAAALEHDKAYDRQLDSGDNPYLKYNHADAEFRERLKEDTSFGGNLGRAVFQAKKRVLEPLGLVEEPVKTAPGKKRPVEHSPVEPDSSSGTGKAGQQPARKRLNFGQTGDADSVPDPQPLGQPPAAPSGLGTNTMATGSGAPMADNNEGADGVGNSSGNWHCDSTWMGDRVITTSTRTWALPTYNNHLYKQISSQSGASNDNHYFGYSTPWGYFDFNRFHCHFSPRDWQRLINNNWGFRPKRLNFKLFNIQVKEVTQNDGTTTIANNLTSTVQVFTDSEYQLPYVLGSAHQGCLPPFPADVFMVPQYGYLTLNNGSQAVGRSSFYCLEYFPSQMLRTGNNFTFSYTFEDVPFHSSYAHSQSLDRLMNPLIDQYLYYLSRTNTPSGTTTQSRLQFSQAGASDIRDQSRNWLPGPCYRQQRVSKTSADNNNSEYSWTGATKYHLNGRDSLVNPGPAMASHKDDEEKFFPQSGVLIFGKQGSEKTNVDIEKVMITDEEEIRTTNPVATEQYGSVSTNLQRGNRQAATADVNTQGVLPGMVWQDRDVYLQGPIWAKIPHTDGHFHPSPLMGGFGLKHPPPQILIKNTPVPANPSTTFSAAKFASFITQYSTGQVSVEIEWELQKENSKRWNPEIQYTSNYNKSVNVDFTVDTNGVYSEPRPIGTRYLTRNL

SEQ ID NO: 4026 - protein, 735 aa, Artificial Sequence
  Description of Artificial Sequence: Synthetic polypeptide
MAADGYLPDWLEDTLSEGIRQWWKLKPGPPPPKPAERHKDDSRGLVLPGYKYLGPFNGLDKGEPVNEADAAALEHDKAYDRQLDSGDNPYLKHNHADAEFQERLKEDTSFGGNLGRAVFQAKKRVLEPLGLVEEPVKTAPGKKRPVEHSPVEPDSSSGTGKAGQQPARKRLNFGQTGDADSVPDPQPLGQPPAAPSGLGTNTMATGSGAPMADNNEGADGVGNSSGNWHCDSTWMGDRVITTSTRTWALPTYNNHLYKQISSQSGASNDNHYFGYSTPWGYFDFNRFHCHFSPRDWQRLINNNWGFRPKRLNFKLFNIQVKEVTQNDGTTTIANNLTSTVQVFTDSEYQLPYVLGSAHQGCLPPFPADVFMVPQYGYLTLNNGSQAVGRSSFYCLEYFPSQMLRTGNNFTFSYTFEDVPFHSSYAHSQSLDRLMNPLIDQYLYYLSRTNTPSGTTTQSRLQFSQAGASDIRDQSRNWLPGPCYRQQRVSKTSADNNNSEYSWTGATKYHLNGRDSLVNPGPAMASHKDDEEKFFPQSGVLIFGKQGSEKTNVDIEKVMITDEEEIRTTNPVATEQYGSVSTNLQRGNRQAATADVNTQGVLPGMVWQDRDVYLQGPIWAKIPHTDGHFHPSPLMGGFGLKHPPPQILIKNTPVPANPSTTFSAAKFASFITQYSTGQVSVEIEWELQKENSKRWNPEIQYTSNYNKSVNVDFTVDTNGVYSEPRPIGTRYLTRNL

SEQ ID NO: 4027 - protein, 735 aa, Artificial Sequence
  Description of Artificial Sequence: Synthetic polypeptide
MAADGYLPDWLEDTLSEGIRQWWKLKPGPPPPKPAERHKDDSRGLVLPGYKYLGPFNGLDKGEPVNEADAAALEHDKAYDRQLDSGDNPYLKYNHADAEFQERLKEDTSFGGNLGRAVFQAKKRVLEPLGLVEEPVKTAPGKKRPVEHSPVEPDSSSGTGKAGQQPARKRLNFGQTGDADSVPDPQPLGQPPAAPSGLGTNTMATGSGAPMADNNEGADGVGNSSGNWHCDSTWMGDRVITTSTRTWALPTYNNHLYKQISSQSGASNDNHYFGYSTPWGYFDFNRFHCHFSPRDWQRLINNNWGFRPKRLNFKLFNIQVKEVTQNDGTTTIANNLTSTVQVFTDSEYQLPYVLGSAHQGCLPPFPADVFMVPQYGYLTLNNGSRAVGRSSFYCLEYFPSQMLRTGNNFTFSYTFEDVPFHSSYAHSQSLDRLMNPLIDQYLYYLSRTNTPSGTTTQSRLQFSQAGASDIRDQSRNWLPGPCYRQQRVSKTSADNNNSEYSWTGATKYHLNGRDSLVNPGPAMASHKDDEEKFFPQSGVLIFGKQGSEKTNVDIEKVMITDEEEIRTTNPVATEQYGSVSTNLQRGNRQAATADVNTQGVLPGMVWQDRDVYLQGPIWAKIPHTDGHFHPSPLMGGFGLKHPPPQILIKNTPVPANPSTTFSAAKFASFITQYSTGQVSVEIEWELQKENSKRWNPEIQYTSNYNKSVNVDFTVDTNGVYSEPRPIGTRYLTRNL

SEQ ID NO: 4028 - protein, 735 aa, Artificial Sequence
  Description of Artificial Sequence: Synthetic polypeptide
MAADGYLPDWLEDTLSEGIRQWWKLKPGPPPPKPAERHKDDSRGLVLPGYKYLGPFNGLDKGEPVNEADAAALEHDKAYDRQLDSGDNPYLKYNHADAEFQERLKEDTSFGGNLGRAVFQAKKRVLEPLGLVEEPVKTAPGKKRPVEHSPVEPDSSSGTGKAGQQPARKRLNFGQTGDADSVPDPQPLGQPPAAPSGLGTNTMATGSGAPMADNNEGADGVGNSSGNWHCDSTWMGDRVITTSTRTWALPTYNNHLYKQISSQSGASNDNHYFGYSTPWGYFDFNRFHCHFSPRDWQRLINNNWGFRPKRLNFKLFNIQVKEVTQNDGTTTIANNLTSTVQVFTDSEYQLPYVLGSAHQGCLPPFPADVFMVPQYGYLTLNNGSQAVGRSSFYCLEYFPSQMLRTGNNFTFSYTFEDVPFHSSYAHSQSLDRLMNPLIDQYLYYLSRTNTPSGTTTQSRLQFSQAGASDIRDQSRNWLPGPCYRQQRVSKTSADNNNSEYSWTGATKYHLNGRDSLVNPGPAMASHKDDEEKFFPQSGVLIFGKQGSEKTNVDIEKVVITDEEEIRTTNPVATEQYGSVSTNLQRGNRQAATADVNTQGVLPGMVWQDRDVYLQGPIWAKIPHTDGHFHPSPLMGGFGLKHPPPQILIKNTPVPANPSTTFSAAKFASFITQYSTGQVSVEIEWELQKENSKRWNPEIQYTSNYNKSVNVDFTVDTNGVYSEPRPIGTRYLTRNL

SEQ ID NO: 4029 - protein, 735 aa, Artificial Sequence
  Description of Artificial Sequence: Synthetic polypeptide
MAADGYLPDWLEDTLSEGIRQWWKLKPGPPPPKPAERHKDDSRGLVLPGYKYLGPFNGLDKGEPVNEADAAALEHDKAYDRQLDSGDNPYLKYNHADAEFQERLKEDTSFGGNLGRAVFQAKKRVLEPLGLVEEPVKTAPGKKRPVEHSPVEPDSSSGTGKAGQQPARKRLNFGQTGDADSVPDPQPLGQPPAAPSGLGTNTMATGSGAPMADNNEGADGVGNSSGNWHCDSTWMGDRVITTSTRTWALPTYNNHLYKQISSQSGASNDNHYFGYSTPWGYFDFNRFHCHFSPRDWQRLINNNWGFRPKRLNFKLFNIQVKEVTQNDGTTTIANNLTSTVQVFTDSEYQLPYVLGSAHQGCLPPFPADVFMVPQYGYLTLNNGSQAVGRSSFYCLEYFPSQMLRTGNNFTFSHTFEDVPFHSSYAHSQSLDRLMNPLIDQYLYYLSRTNTPSGTTTQSRLQFSQAGASDIRDQSRNWLPGPCYRQQRVSKTSADNNNSEYSWTGATKYHLNGRDSLVNPGPAMASHKDDEEKFFPQSGVLIFGKQGSEKTNVDIEKVMITDEEEIRTTNPVATEQYGSVSTNLQRGNRQAATADVNTQGVLPGMVWQDRDVYLQGPIWAKIPHTDGHFHPSPLMGGFGLKHPPPQILIKNTPVPANPSTTFSAAKFASFITQYSTGQVSVEIEWELQKENSKRWNPEIQYTSNYNKSVNVDFTVDTNGVYSEPRPIGTRYLTRNL

SEQ ID NO: 4030 - protein, 735 aa, Artificial Sequence
  Description of Artificial Sequence: Synthetic polypeptide
MAADGYLPDWLEDTLSEGIRQWWKLKPGPPPPKPAERHKDDSRGLVLPGYKYLGPFNGLDKGEPVNEADAAALEHDKAYDRQLDSGDNPYLKYNHADAEFQERLKEDTSFGGNLGRAVFQAKKRVLEPLGLVEEPVKTAPGKKRPVEHSPVEPDSSSGTGKAGQQPARKRLNFGQTGDADSVPDPQPLGQPPAAPSGLGTNTMATGSGAPMADNNEGADGVGNSSGNWHCDSTWMGGRVITTSTRTWALPTYNNHLYKQISSQSGASNDNHYFGYSTPWGYFDFNRFHCHFSPRDWQRLINNNWGFRPKRLNFKLFNIQVKEVTQNDGTTTIANNLTSTVQVFTDSEYQLPYVLGSAHQGCLPPFPADVFMVPQYGYLTLNNGSQAVGRSSFYCLEYFPSQMLRTGNNFTFSYTFEDVPFHSSYAHSQSLDRLMNPLIDQYLYYLSRTNTPSGTTTQSRLQFSQAGASDIRDQSRNWLPGPCYRQQRVSKTSADNNNSEYSWTGATKYHLNGRDSLVNPGPAMASHKDDEEKFFPQSGVLIFGKQGSEKTNVDIEKVMITDEEEIRTTNPVATEQYGSVSTNLQRGNRQAATADVNTQGVLPGMVWQDRDVYLQGPIWAKIPHTDGHFHPSPLMGGFGLKHPPPQILIKNTPVPANPSTTFSAAKFASFITQYSTGQVSVEIEWELQKENSKRWNPEIQYTSNYNKSVNVDFTVDTNGVYSEPRPIGTRYLTRNL

SEQ ID NO: 4031 - protein, 735 aa, Artificial Sequence
  Description of Artificial Sequence: Synthetic polypeptide
MAADGYLPDWLEDTLSEGIRQWWKLKPGPPPPKPAERHKDDSRGLVLPGYKYLGPFNGLDKGEPVNEADAAALEHDKAYDRQLDSGDNPYLKYNHADAEFQERLKEDTSFGGNLGRAVFQAKKRVLEPLGLVEEPVKTAPGKKRPVEHSPVEPDSSSGTGKAGQQPARKRLNFGQTGDADSVPDPQPLGQPPAAPSGLGTNTMATGSGAPMADNNEGADGVGNSSGNWHCDSTWMGDRVITTSTRTWALPTYNNHLYKQISSQSGASNDNHYFGYSTPWGYFDFNRFHCHFSPRDWQRLINNNWGFRPKRPNFKLFNIQVKEVTQNDGTTTIANNLTSTVQVFTDSEYQLPYVLGSAHQGCLPPFPADVFMVPQYGYLTLNNGSQAVGRSSFYCLEYFPSQMLRTGNNFTFSYTFEDVPFHSSYAHSQSLDRLMNPLIDQYLYYLSRTNTPSGTTTQSRLQFSQAGASDIRDQSRNWLPGPCYRQQRVSKTSADNNNSEYSWTGATKYHLNGRDSLVNPGPAMASHKDDEEKFFPQSGVLIFGKQGSEKTNVDIEKVMTTDEEEIRTTNPVATEQYGSVSTNLQRGNRQAATADVNTQGVLPGMVWQDRDVYLQGPIWAKIPHTDGHFHPSPLMGGFGLKHPPPQILIKNTPVPANPSTTFSAAKFASFITQYSTGQVSVEIEWELQKENSKRWNPEIQYTSNYNKSVNVDFTVDTNGVYSEPRPIGTRYLTRNL

SEQ ID NO: 4032 - protein, 735 aa, Artificial Sequence
  Description of Artificial Sequence: Synthetic polypeptide
MAADGYLPDWLEDTLSEGIRQWWKLKPGPPPPKPAERHKDDSRGLVLPGYKYLGPFNGLDKGEPVNEADAAALEHDKAYDRQLDSGDNPYLKYNHADAEFRERLKEDTSFGGNLGRAVFQAKKRVLEPLGLVEEPVKTAPGKKRPVEHSPVEPDSSSGTGKAGQQPARKRLNFGQTGDADSVPDPQPLGQPPAAPSGLGTNTMATGSGAPMADNNEGADGVGNSSGNWHCDSTWMGDRVITTSTRTWALPTYNNHLYKQISSQSGASNDNHYFGYSTPWGYFDFNRFHCHFSPRDWQRLINNNWGFRPKRLNFKLFNIQVKEVTQNDGTTTIANNLTSTVQVFTDSEYQLPYVLGSAHQGCLPPFPADVFMVPQYGYLTLNNGSQAVGRSSFYCLEYFPSQMLRTGNNFTFSYTFEDVPFHSSYAHSQSLDRLMNPLIDQYLYYLSRTNTPSGTTTQSRLQFSQAGASDIRDQSRNWLPGPCYRQQRVSKTSADNNNSEYSWTGATKYHLNGRDSLVNPGPAMASHKDDEEKFFPQSGVLIFGKQGSEKTNVDIEKVMTTDEEEIRTTNPVATEQYGSVSTNLQRGNRQAATADVNTQGVLPGMVWQDRDVYLQGPIWAKIPHTDGHFHPSPLMGGFGLKHPPPQILIKNTPVPANPSTTFSAAKFASFITQYSTGQVSVEIEWELQKENSKRWNPEIQYTSNYNKSVNVDFTVDTNGVYSEPRPIGTRYLTRNL

SEQ ID NO: 4033 - protein, 735 aa, Artificial Sequence
  Description of Artificial Sequence: Synthetic polypeptide
MAADGYLPDWLEDTLSEGIRQWWKLKPGPPPPKPAERHKDDSRGLVLPGYKYLGPFNGLDKGEPVNEADAAALEHDKAYDRQLDSGDNPYLKYNHADAEFQERLKEDTSFGGNLGRAVFQAKKRVLEPLGLVEEPVKTAPGKKRPVEHSPVEPDPSSGTGKAGQQPARKRLNFGQTGDADSVPDPQPLGQPPAAPSGLGTNTMATGSGAPMADNNEGADGVGNSSGNWHCDSTWMGDRVITTSTRTWALPTYNNHLYKQISSQSGASNDNHYFGYSTPWGYFDFNRFHCHFSPRDWQRLINNNWGFRPKRLNFKLFNIQVKEVTQNDGTTTIANNLTSTVQVFTDSEYQLPYVLGSAHQGCLPPFPADVFMVPQYGYLTLNNGSQAVGRSSFYCLEYFPSQMLRTGNNFTFSYTFEDVPFHSSYAHSQSLDRLMNPLIDQYLYYLSRTNTPSGTTTQSRLQFSQAGASDIRDQSRNWLPGPCYRQQRVSKTSADNNNSEYSWTGATKYHLNGRDSLVNPGPAMASHKDDEEKFFPQSGVLIFGKQGSEKTNVDIEKVMITDEEEIRTTNPVATEQYGSVSTNLQRGNRQAATADVNTQGVLPGMVWQDRDVYLQGPIWAKIPHTDGHFHPSPLMGGFGLKHPPPQILIKNTPVPANPSTTFSAAKFASFITQYSTGQVSVEIEWELQKENSKRWNPEIQYTSNYNKSVNVDFTVDTNGVYSEPRPIGTRYLTRNL

SEQ ID NO: 4034 - protein, 735 aa, Artificial Sequence
  Description of Artificial Sequence: Synthetic polypeptide
MAADGYLPDWLEDTLSEGIRQWWKLKPGPPPPKPAERHKDDSRGLVLPGYKYLGPFNGLDKGEPVNEADAAALEHDKAYDRQLDSGDNPYLKYNHADAEFQERLKEDTSFGGNLGRAVFQAKKRVLEPLGLVEEPVKTAPGKKRPVEHSPVEPDSSSGTGKAGQQPARKRLNFGQTGDADSVPDPQPLGQPPAAPSGLGTNTMATGSGAPMADNNEGADGVGNSSGNWHCDSTWMGDRVITTSTRTWALPTYNNHLYKQISSQSGASNDNHYFGYSTPWGYFDFNRFHCHFSPRDWQRLINNNWGFRPKRLNFKLFNIQVKEVTQNDGTTTIANNLTSTVQVFTDSEYQLPYVLGSAHQGCLPPFPADVFMVPQYGYLTLNNGSQAVGRSSFYCLEYFPSQMLRTGNNFTFSYTFEDVPFHSSYAHSQSLDRLMNPLIDQYLYYLSRTNTPSGTTTQSRLQFSQAGASDIRDQSRNWLPGPCYRQQRVSKTSADNNNSEYSWTGATKYHLNGRDSLVNPGPAMASHKDDEEKFFPQSGVLIFGKQGSEKTNVDIEKVMITDEEEIRTTNPVATEQYGSVSTNLQRGNRQAATADVNTQGVLPGMVWQDRDVYLQGPIWAKIPHTDGHFHPSPLMGGFGLKHPPPQILIKNTPVPANPSTTFSAAKFASFITQYSTGQVSVEIEWELQKENSKRWNPEIQYTSNYNKSVNVDFTVDTNGVYSESRPIGTRYLTRNL

SEQ ID NO: 4035 - protein, 735 aa, Artificial Sequence
  Description of Artificial Sequence: Synthetic polypeptide
MAADGYLPDWLEDTLSEGIRQWWKLKPGPPPPKPAERHKDDSRGLVLPGYKYLGPFNGLDKGEPVNEADAAALEHDKAYDRQLDSGDNPYLKYNHADAEFQERLKEDTSFGGNLGRAVFQAKKRVLEPLGLVEEPVKTAPGKKRPVEHSPVEPDSSSGTGKAGQQPARKRLNFGQTGDADSVPDPQPLGQPPAAPSGLGTNTMATGSGAPMADNNEGADGVGNSSGNWHCDSTWMGDRVITTSTRTWALPTYNNHLYKQISSQSGASNDNHYFGYSTPWGYFDFNRFHCHFSPRDWQRLINNNWGFRPKRLNFKLFNIQVKEVTQNDGTTTIANNLTSTVQVFTDSEYQLPYVLGSAHQGCLPPFPADVFMVPQYGYLTPNNGSQAVGRSSFYCLEYFPSQMLRTGNNFTFSYTFEDVPFHSSYAHSQSLDRLMNPLIDQYLYYLSRTNTPSGTTTQSRLQFSQAGASDIRDQSRNWLPGPCYRQQRVSKTSADNNNSEYSWTGATKYHLNGRDSLVNPGPAMASHKDDEEKFFPQSGVLIFGKQGSEKTNVDIEKVMITDEEEIRTTNPVATEQYGSVSTNLQRGNRQAATADVNTQGVLPGMVWQDRDVYLQGPIWAKIPHTDGHFHPSPLMGGFGLKHPPPQILIKNTPVPANPSTTFSAAKFASFITQYSTGQVSVEIEWELQKENSKRWNPEIQYTSNYNKSVNVDFTVDTNGVYSEPRPIGTRYLTRNL

SEQ ID NO: 4036 - protein, 735 aa, Artificial Sequence
  Description of Artificial Sequence: Synthetic polypeptide
MAADGYLPDWLEDTLSEGIRQWWKLKPGPPPPKPAERHKDDSRGLVLPGYKYLGPFNGLDKGEPVNEADAAALEHDKAYDRQLDSGDNPYLKYNHADAEFQERLKEDTSFGGNLGRAVFQAKKRVLEPLGLVEEPVKTAPGKKRPVEHSPVEPDSSSGTGKAGQQPARKRLNFGQTGDADSVPDPQPLGQPPAAPSGLGTNTMATGSGAPMADNNEGADGVGNSSGNWHCDSTWMGDRVITTSTRTWALPTYNNHLYKQISSQSGASNDNHYFGYSTPWGYFDFNRFHCHFSPRDWQRLINNNWGFRPKRLNFKLFNIQVKEVTQNDGTTTIANNLTSTVQVFTDSEYQLPYVLGSAHQGCLPPFPADVFMVPQYGYLTLNNGSQAVGRSSFYCLEYFPSQMLRTGNNFTFSYTFEDVPFHSSYAHSQSLDRLMNPLIDQYLYYLSRTNTPSGTTTQSRLQFSQAGASDIRDQSRNWLPGPCYRQQRVSKTSADNNNSEYSWTGATKYHLNGRDSLVNPGPAMASHKDDEEKFFPQSGVLIFGKQGSEKTNVDIEKVMITDEEEIRTTNPVATEQYGSVSTNLQRGNRQAATADVNTQGVLPGMAWQDRDVYLQGPIWAKIPHTDGHFHPSPLMGGFGLKHPPPQILIKNTPVPANPSTTFSAAKFASFITQYSTGQVSVEIEWELQKENSKRWNPEIQYTSNYNKSVNVDFTVDTNGVYSEPRPIGTRYLTRNL

SEQ ID NO: 4037 - protein, 735 aa, Artificial Sequence
  Description of Artificial Sequence: Synthetic polypeptide
MAADGYLPDWLEDTLSEGIRQWWKLKPGPPPPKPAERHKDDSRGLVLPGYKYLGPFNGLDKGEPVNEADAAALEHDKAYDRQLDSGDNPYLKYNHADAEFQERLKEDTSFGGNLGRAVFQAKKRVLEPLGLVEEPVKTAPGKKRPVEHSPVEPDSSSGTGKAGQQPARKRLNFGQTGDADSVPDPQPLGQPPAAPTSLGSTTMATGSGAPMADNNEGADGVGNSSGNWHCDSQWLGDRVITTSTRTWALPTYNNHLYKQISSQSGASNDNHYFGHSTPWGYFDFNRFHCHFSPRDWQRLINNNWGFRPKRLNFKLFNIQVKEVTQNDGTTTIANNLTSTVQVFTDSEYQLPYVLGSAHQGCLPPFPADVFMVPQYGYLTLNNGSQAVGRSSFYCLEYFPSQMLRTGNNFTFSYTFEDVPFHSSYAHSQSLDRLMNPLIDQYLYYLSRTNTPSGTTTQSRLQFSQAGASDIRDQSRNWLPGPCYRQQRVSKTSADNNNSEYSWTGATKYHLNGRDSLVNPGPAMASHKDDEEKFFPQSGVLIFGKQGSEKTNVDIEKVMITDEEEIRTTNPVATEQYGSVSTNLQRGNRQAATADVNTQGVLPGMVWQDRDVYLQGPIWAKIPHTDGHFHPSPLMGGFGLKHPPPQILIKNTPVPANPSTTFSAAKFASFITQYSTGQVSVEIEWELQKENSKRWNPEIQYTSNYNKSVNVDFTVDTNGVYSEPRPIGTRYLTRNL

SEQ ID NO: 4038 - protein, 735 aa, Artificial Sequence
  Description of Artificial Sequence: Synthetic polypeptide
MAADGYLPDWLEDTLSEGIRQWWKLKPGPPPPKPAERHKDDSRGLVLPGYKYLGPFNGLDKGEPVNEADAAALEHDKAYDRQLDSGDNPYLKYNHADAEFQERLKEDTSFGGNLGRAVFQAKKRVLEPLGLVEEPVKTAPGKKRPVEHSPVEPDSSSGTGKAGQQPARKRLNFGQTGDADSVPDPQPLGQPPAAPSGLGTNTMATGSGAPMADNNEGADGVGNSSGNWHCDSTWMGDRVITTSTRTWALPTYNNHLYKQISSQSGASNDNHYFGYSTPWGYFDFNRFHCHFSPRDWQRLINNNWGFRPKRLNFKLFNIQVKEVTQNDGTTTIANNLTSTVQVFTDSEYQLPYVLGSAHQGCLPPFPADVFMVPQYGYLTLNNGSQAVGRSSFYCLEYFPSQMLRTGNNFTFSYTFEDVPFHSSYAHSQSLDRLMNPLIDQYLYYLSRTNTPSGTTTQSRLQFSQAGASDIRDQSRNWLPGPCYRQQRVSKTSADNNNSEYSWTGATKYHLNGRDSLVNPGPAMASHKDDEEKFFPQSGVLIFGKQGSEKTNVDIEKVMITDEEEIRTTNPVATEQYGSVSTNLQRGNRQAATADVNTQGVLPGMVWQDRDVYLQGPIWAKIPHTDGHFHPSPLMGGFGLKHPPPQILIKNTPVPANPSTTFSAAKFASFITQYSTGQASVEIEWELQKENSKRWNPEIQYTSNYNKSVNVDFTVDTNGVYSEPRPIGTRYLTRNL

SEQ ID NO: 4039 - protein, 735 aa, Artificial Sequence
  Description of Artificial Sequence: Synthetic polypeptide
MAADGYLPDWLEDTLSEGIRQWWKLKPGPPPPKPAERHKDDSRGLVLPGYKYLGPFNGLDKGEPVNEADAAALEHDKAYDRQLDSGDNPYLKYNHADAEFQERLKEDTSFGGNLGRAVFQAKKRVLEPLGLVEEPVKTAPGKKRPVEHSPVEPDSSSGTGKAGQQPARKRLNFGQTGDADSVPDPQPLGQPPAAPSGLGTNTMATGSGAPMADNNEGADGVGNSSGNWHCDSTWMGDRVITTSTRTWALPTYNNHLYKQISSQSGASNDNHYFGYSTPWGYFDFNRFHCHFSPRDWQRLINNNWGFRPKRLNFKLFNIQVKEVTQNDGTTTIANNLTSTVQVFTDSEYQLPYVLGSAHQGCLPPFPADVFMVPQYGYLTLNNGSQAVGRSSFYCLEYFPSQMLRTGNNFTFSYTFEDVPFHSSYAHSQSLDRLMNPLIDQYLYYLSRTNTPSGTTTQSRLQFSQAGASDIRDQSRNWLPGPCYRQQRVSKTSADNNNSEYSWTGATKYHLNGRDSLVNPGPAMASHKDDEEKFFPQSGVLIFGKQGSEKTNVDIEKVMITDEEEIRTTNPVATEQYGSVSTNLQRGNRQAATADVNTQGVLPGMVWQDRDVYLQGPIWAKIPHTDGHFHPSPLMGGFGLKHPPPQILIKNTPVPANPSTTFSAARFASFITQYSTGQVSVEIEWELQKENSKRWNPEIQYTSNYNKSVNVDFTVDTNGVYSEPRPIGTRYLTRNL

SEQ ID NO: 4040 - protein, 735 aa, Artificial Sequence
  Description of Artificial Sequence: Synthetic polypeptide
MAADGYLPDWLEDTLSEGIRQWWKLKPGPPPPKPAERHKDDSRGLVLPGYKYLGPFNGLDKGEPVNEADAAALEHDKAYDRQLDSGDNPYLKYNHADAEFQERLKEDTSFGGNLGRAVFQAKKRVLEPLGLVEEPVKTAPGKKRPVEHSPVEPDSSSGTGKAGQQPARKRLNFGQTGGADSVPDPQPLGQPPAAPSGLGTNTMATGSGAPMADNNEGADGVGNSSGNWHCDSTWMGDRVITTSTRTWALPTYNNHLYKQISSQSGASNDNHYFGYSTPWGYFDFNRFHCHFSPRDWQRLINNNWGFRPKRLNFKLFNIQVKEVTQNDGTTTIANNLTSTVQVFTDSEYQLPYVLGSAHQGCLPPFPADVFMVPQYGYLTLNNGSQAVGRSSFYCLEYFPSQMLRTGNNFTFSYTFEDVPFHSSYAHSQSLDRLMNPLIDQYLYYLSRTNTPSGTTTQSRLQFSQAGASDIRDQSRNWLPGPCYRQQRVSKTSADNNNSEYSWTGATKYHLNGRDSLVNPGPAMASHKDDEEKFFPQSGVLIFGKQGSEKTNVDIEKVMITDEEEIRTTNPVATEQYGSVSTNLQRGNRQAATADVNTQGVLPGMVWQDRDVYLQGPIWAKIPHTDGHFHPSPLMGGFGLKHPPPQILIKNTPVPANPSTTFSAAKFASFITQYSTGQVSVEIEWELQKENSKRWNPEIQYTSNYNKSVNVDFTVDTNGVYSEPRPIGTRYLTRNL

SEQ ID NO: 4041 - protein, 735 aa, Artificial Sequence
  Description of Artificial Sequence: Synthetic polypeptide
MAADGYLPDWLEDTLSEGIRQWWKLKPGPPPPKPAERHKDDSRGLVLPGYKYLGPFNGLDKGEPVNEADAAALEHDKAYDRQLDSGDNPYLKYNHADAEFQERLKEDTSFGGNLGRAVFQAKKRVLEPLGLVEEPVKTAPGKKRPVEHSPVEPDSSSGTGKAGQQPARKRLNFGQTGDADSVPDPQPLGQPPAAPSGLGTNTMATGSGAPMADNNEGADGVGNSSGNWHCDSTWMGDRVITTSTRTWALPTYNNHLYKQISSQSGASNDNHYFGYSTPWGYFDFNRFHCHFSPRDWQRLINNNWGFRPKRLNFKLFNIQVKEVTQNDGTTTIANNLTSTVQVFTDSEYQLPYVLGSAHQGCLPPFPADVFMVPQYGYLTLNNGSQAVGRSSFYCLEYFPSQMLRTGNNFTFSYTFEDVPFHSSYAHSQSLDRLMNPLIDQYLYYLSRTNTPSGTTTQSRLQFSQAGASDIRDQSRNWLPGPCYRQQRVSKTSADNNNSEYSWTGATKYHLNGRDSLVNPGPAMASHKDDEEKFFPQSGVLIFGKQGSEKTNVDIEKVMITDEEEIRTTNPVATEQYGSVSTNLQRGNRQAATADVNTQGVLPGMVWQDRDVYLQGPIWAKIPHTDGHFHPSPLMGGFGLKHPPPQILIKNTPVPANPSTTFSAAKFASFITQYSTGQVSVEIEWELQKENSKRWNPEIQYTSNYNKSANVDFTVDTNGVYSEPRPIGTRYLTRNL

SEQ ID NO: 4042 - protein, 735 aa, Artificial Sequence
  Description of Artificial Sequence: Synthetic polypeptide
MAADGYLPDWLEDTLSEGIRQWWKLKPGPPPPKPAERHKDDSRGLVLPGYKYLGPFNGLDKGEPVNEADAAALEHDKAYDRQLDSGDNPYLKYNHADAEFQERLKEDTSFGGNLGRAVFQAKKRVLEPLGLVEEPVKTAPGKKRPVEHSPVEPDSSSGTGKAGQQPARKRLNFGQTGDADSVPDPQPLGQPPAAPSGLGTNTMATGSGAPMADNNEGADGVGNSSGNWHCDSTWMGDRVITTSTRTWALPTYNNHLYKQISSQSGASNDNHYFGYSTPWGYFDFNRFHCHFSPRDWQRLINNNWGFRPKRLNFKLFNIQVKEVTQNDGTTTIANNLTSTVQVFTDSEYQLPYVLGSAHQGCLPPFPADVFMVPQYGYLTLNNGSQAVGRSSFYCLEYFPSQMLRTGNNFTFSYTFEDVPFHSSYAHSQSLDRLMNPLIDQYLYYLSRTNTPSGTTTQSRLQFSQAGASDIRDRSRNWLPGPCYRQQRVSKTSADNNNSEYSWTGATKYHLNGRDSLVNPGPAMASHKDDEEKFFPQSGVLIFGKQGSEKTNVDIEKVMITDEEEIRTTNPVATEQYGSVSTNLQRGNRQAATADVNTQGVLPGMVWQDRDVYLQGPIWAKIPHTDGHFHPSPLMGGFGLKHPPPQILIKNTPVPANPSTTFSAAKFASFITQYSTGQVSVEIEWELQKENSKRWNPEIQYTSNYNKSVNVDFTVDTNGVYSEPRPIGTRYLTRNL

SEQ ID NO: 4043 - protein, 735 aa, Artificial Sequence
  Description of Artificial Sequence: Synthetic polypeptide
MAADGYLPDWLEDTLSEGIRQWWKLKPGPPPPKPAERHKDDSRGLVLPGYKYLGPFNGLDKGEPVNEADAAALEHDKAYDRQLDSGDNPYLKYNHADAEFQERLKEDTSFGGNLGRAVFQAKKRVLEPLGLVEEPVKTAPGKKRPVEHSPVEPDSSSGTGKAGQQPARKRLNFGQTGDADSVPDPQPLGQPPAAPSGLGTNTMATGSGAPMADNNEGADGVGNSSGNWHCDSTWMGDRVITTSTRTWALPTYNNHLYKQISSQSGASNDNHYFGYSTPWGYFDFNRFHCHFSPRDWQRLINNNWGFRPKRLNFKLFNIQVKEVTQNDGTTTIANNLTSTVQVFTDSEYQLPYVLGSAHQGCLPPFPADVFMVPQYGYLTLNNGSQAVGRSSFYCLEYFPSQMLRTGNNFTFSYTFEDVPFHSSYAHSQSLDRLMNPLIDQYLYYLSRTNTPSGTTTQSRLQFSQAGASDIRDQSRNWLPGPCYRQQRVSKASADNNNSEYSWTGATKYHLNGRDSLVNPGPAMASHKDDEEKFFPQSGVLIFGKQGSEKTNVDIEKVMITDEEEIRTTNPVATEQYGSVSTNLQRGNRQAATADVNTQGVLPGMVWQDRDVYLQGPIWAKIPHTDGHFHPSPLMGGFGLKHPPPQILIKNTPVPANPSTTFSAAKFASFITQYSTGQVSVEIEWELQKENSKRWNPEIQYTSNYNKSVNVDFTVDTNGVYSEPRPIGTRYLTRNL

SEQ ID NO: 4044 - protein, 735 aa, Artificial Sequence
  Description of Artificial Sequence: Synthetic polypeptide
MAADGYLPDWLEDTLSEGIRQWWKLKPGPPPPKPAERHKDDSRGLVLPGYKYLGPFNGLDKGEPVNEADAAALEHDKAYDRQLDSGDNPYLKYNHADAEFQERLKEDTSFGGNLGRAVFQAKKRVLEPLGLVEEPVKTAPGKKRPVEHSPVEPDSSSGTGKAGQQPARKRLNFGQTGDADSVPDPQPLGQPPAAPSGLGTNTMATGSGAPMADNNEGADGVGNSSGNWHCDSTWMGDRVITTSTRTWALPTYNNHLYKQISSQSGASNDNHYFGYSTPWGYFDFNRFHCHFSPRDWQRLINNNWGFRPKRLNFKLFNIQVKEVTQNDGTTTIANNLTSTVQVFTDSEYQLPYVLGSAHQGCLPPFPADVFMVPQYGYLTLNNGSQAVGRSSFYCLEYFPSQMLRTGNNFTFSYTFEDVPFHSSYAHSQSLDRLMNPLIDQYLYYLSRTNTPSGTTTQSRLQFSQAGASDIRDQSRNWLPGPCYRQQRVSKTSADNNNSEYSWTGATKHHLNGRDSLVNPGPAMASHKDDEEKFFPQSGVLIFGKQGSEKTNVDIEKVMITDEEEIRTTNPVATEQYGSVSTNLQRGNRQAATADVNTQGVLPGMVWQDRDVYLQGPIWAKIPHTDGHFHPSPLMGGFGLKHPPPQILIKNTPVPANPSTTFSAAKFASFITQYSTGQVSVEIEWELQKENSKRWNPEIQYTSNYNKSVNVDFTVDTNGVYSEPRPIGTRYLTRNL

SEQ ID NO: 4045 - protein, 735 aa, Artificial Sequence
  Description of Artificial Sequence: Synthetic polypeptide
MAADGYLPDWLEDTLSEGIRQWWKLKPGPPPPKPAERHKDDSRGLVLPGYKYLGPFNGLDKGEPVNEADAAALEHDKAYDRQLDSGDNPYLKYNHADAEFQERLKEDTSFGGNLGRAVFQAKKRVLEPLGLVEEPVKTAPGKKRPVEHSPVEPDSSSGTGKAGQQPARKRLNFGQTGDADSVPDPQPLGQPPAAPSGLGTNTMATGSGAPMADNNEGADGVGNSSGNWHCDSTWMGDRVITTSTRTWALPTYNNHLYKQISSQSGASNDNHYFGYSTPWGYFDFNRFHCHFSPRDWQRLINNNWGFRPKRLNFKLFNIQVKEVTQNDGTTTIANNLTGTVQVFTDSEYQLPYVLGSAHQGCLPPFPADVFMVPQYGYLTLNNGSQAVGRSSFYCLEYFPSQMLRTGNNFTFSYTFEDVPFHSSYAHSQSLDRLMNPLIDQYLYYLSRTNTPSGTTTQSRLQFSQAGASDIRDQSRNWLPGPCYRQQRVSKTSADNNNSEYSWTGATKYHLNGRDSLVNPGPAMASHKDDEEKFFPQSGVLIFGKQGSEKTNVDIEKVMITDEEEIRTTNPVATEQYGSVSTNLQRGNRQAATADVNTQGVLPGMVWQDRDVYLQGPIWAKIPHTDGHFHPSPLMGGFGLKHPPPQILIKNTPVPANPSTTFSAAKFASFITQYSTGQVSVEIEWELQKENSKRWNPEIQYTSNYNKSVNVDFTVDTNGVYSEPRPIGTRYLTRNL

SEQ ID NO: 4046 - protein, 735 aa, Artificial Sequence
  Description of Artificial Sequence: Synthetic polypeptide
MAADGYLPDWLEDTLSEGIRQWWKLKPGPPPPKPAERHKDDSRGLVLPGYKYLGPFNGLDKGEPVNEADAAALEHDKAYDRQLDSGDNPYLKYNHADAEFQERLKEDTSFGGNLGRAVFRAKKRVLEPLGLVEEPVKTAPGKKRPVEHSPVEPDSSSGTGKAGQQPARKRLNFGQTGDADSVPDPQPLGQPPAAPSGLGTNTMATGSGAPMADNNEGADGVGNSSGNWHCDSTWMGDRVITTSTRTWALPTYNNHLYKQISSQSGASNDNHYFGYSTPWGYFDFNRFHCHFSPRDWQRLINNNWGFRPKRLNFKLFNIQVKEVTQNDGTTTIANNLTSTVQVFTDSEYQLPYVLGSAHQGCLPPFPADVFMVPQYGYLTLNNGSQAVGRSSFYCLEYFPSQMLRTGNNFTFSYTFEDVPFHSSYAHSQSLDRLMNPLIDQYLYYLSRTNTPSGTTTQSRLQFSQAGASDIRDQSRNWLPGPCYRQQRVSKTSADNNNSEYSWTGATKYHLNGRDSLVNPGPAMASHKDDEEKFFPQSGVLIFGKQGSEKTNVDIEKVMITDEEEIRTTNPVATEQYGSVSTNLQRGNRQAATADVNTQGVLPGMVWQDRDVYLQGPIWAKIPHTDGHFHPSPLMGGFGLKHPPPQILIKNTPVPANPSTTFSAAKFASFITQYSTGQVSVEIEWELQKENSKRWNPEIQYTSNYNKSVNVDFTVDTNGVYSEPRPIGTRYLTRNL

SEQ ID NO: 4047 - protein, 735 aa, Artificial Sequence
  Description of Artificial Sequence: Synthetic polypeptide
MAADGYLPDWLEDTLSEGIRQWWKLKPGPPPPKPAERHKDDSRGLVLPGYKYLGPFNGLDKGEPVNEADAAALEHDKAYDRQLDSGDNPYLKYNHADAEFQERLKEDTSFGGNLGRAVFQAKKRVLEPLGLVEEPVKTAPGKKRPVEHSPVEPDSSSGTGKAGQQPARKRLNFGQTGDADSVPDPQPLGQPPAAPSGLGTNTMATGSGAPMADNNEGADGVGNSSGNWHCDSTWMGDRVITTSTRTWALPTYNNHLYKQISSQSGASNDNHYFGYSTPWGYFDFNRFHCHFSPRDWQRLINNNWGFRPKRLNFKLFNIQVKEVTQNDGTTTIANNLTSTVQVFTDSEYQLPYVLGSAHQGCLPPFPADVFMVPQYGYLTLNNGSQAVGRSSFYCLEYFPSQMLRTGNNFTFSYTFEDVPFHSSYAHSQSLDRLMNPLIDQYLYYLSRTNTPSGTTTQSRLQFSQAGASDIRDQSRNWLPGPCYRQQRVSKTSADNNNSEYSWTGATKYHLNGRDSLVNPGPAMASHKDDEEKFFPQSGVLIFGKQGSEKTNVDIEKVMITDEEEIRTTNPVATEQYGSVSTNLQRGNRQAATADVNTQGVLPGTVWQDRDVYLQGPIWAKIPHTDGHFHPSPLMGGFGLKHPPPQILIKNTPVPANPSTTFSAAKFASFITQYSTGQASVEIEWELQKENSKRWNPEIQYTSNYNKSVNVDFTVDTNGVYSEPRPIGTRYLTRNL

SEQ ID NO: 4048 - protein, 735 aa, Artificial Sequence
  Description of Artificial Sequence: Synthetic polypeptide
MAADGYLPDWLEDTLSEGIRQWWKLKPGPPPPKPAERHKDASRGLVLPGYKYLGPFNGLDKGEPVNEADAAALEHDKAYDRQLDSGDNPYLKYNHADAEFQERLKEDTSFGGNLGRAVFQAKKRVLEPLGLVEEPVKTAPGKKRPVEHSPVEPDSSSGTGKAGQQPARKRLNFGQTGDADSVPDPQPLGQPPAAPTSLGSTTMATGSGAPMADNNEGADGVGNSSGNWHCDSQWLGDRVITTSTRTWALPTYNNHLYKQISSQSGASNDNHYFGYSTPWGYFDFNRFHCHFSPRDWQRLINNNWGFRPKRLNFKLFNIQVKEVTQNDGTTTIANNLTSTVQVFTDSEYQLPYVLGSAHQGCLPPFPADVFMVPQYGYLTLNNGSQAVGRSSFYCLEYFPSQMLRTGNNFTFSYTFEDVPFHSSYAHSQSLDRLMNPLIDQYLYYLSRTNTPSGTTTQSRLQFSQAGASDIRDQSRNWLPGPCYRQQRVSKTSADNNNSEYSWTGATKYHLNGRDSLVNPGPAMASHKDDEEKFFPQSGVLIFGKQGSEKTNVDIEKVMITDEEEIRTTNPVATEQYGSVSTNLQRGNRQAATADVNTQGVLPGMVWQDRDVYLQGPIWAKIPHTDGHFHPSPLMGGFGLKHPPPQILIKNTPVPANPSTTFSAAKFASFITQYSTGQVSVEIEWELQKENSKRWNPEIQYTSNYNKSVNVDFTVDTNGVYSEPRPIGTRYLTRNL

SEQ ID NO: 4049 - protein, 735 aa, Artificial Sequence
  Description of Artificial Sequence: Synthetic polypeptide
MAADGYLPDWLEDTLSEGIRQWWKLKPGPPPPKPAERHKDDSRGLVLPGYKYLGPFNGLDKGEPVNEADAAALEHDKAYDRQLDSGDNPYLKYNHADAEFQERLKEDTSFGGNLGRAVFQAKKRVLEPLGLVEEPVKTAPGKKRPVEHSPVEPDSSSGTGKAGQQPARKRLNFGQTGDADSVPDPQPLGQPPAAPSGLGTNTMATGSGAPMADNNEGADGVGNSSGNWHCDSTWMGDRVITTSTRTWALPTYNNHLYKQISSQSGAPNDNHYFGYSTPWGYFDFNRFHCHFSPRDWQRLINNNWGFRPKRLNFKLFNIQVKEVTQNDGTTTIANNLTSTVQVFTDSEYQLPYVLGSAHQGCLPPFPADVFMVPQYGYLTLNNGSQAVGRSSFYCLEYFPSQMLRTGNNFTFSYTFEDVPFHSSYAHSQSLDRLMNPLIDQYLYYLSRTNTPSGTTTQSRLQFSQAGASDIRDQSRNWLPGPCYRQQRVSKTSADNNNSEYSWTGATKYHLNGRDSLVNPGPAMASHKDDEEKFFPQSGVLIFGKQGSEKTNVDIEKVMITDEEEIRTTNPVATEQYGSVSTNLQRGNRQAATADVNTQGVLPGMVWQDRDVYLQGPIWAKIPHTDGHFHPSPLMGGFGLKHPPPQILIKNTPVPANPSTTFSAAKFASFITQYSTGQASVEIEWELQKENSKRWNPEIQYTSNYNKSVNVDFTVDTNGVYSEPRPIGTRYLTRNL

SEQ ID NO: 4050 - protein, 735 aa, Artificial Sequence
  Description of Artificial Sequence: Synthetic polypeptide
MAADGYLPDWLEDTLSEGIRQWWKLKPGPPPPKPAERHKDDSRGLVLPGYKYLGPFNGLDKGEPVNEADAAALEHDKAYDRQLDSGDNPYLKYNHADAEFQERLKEDTSFGGNLGRAVFQAKKRVLEPLGLVEEPVKTAPGKKRPVEHSPVEPDSSSGTGKAGQQPARKRLNFGQTGDADSVPDPQPLGQPPAAPTSLGSTTMATGSGAPMADNNEGADGVGNSSGNWHCDSQWLGDRVITTSTRTWALPTYNNHLYKQISSQSGASNDNHYFGYSTPWGYFDFNRFHCHFSPRDWQRLINNNWGFRPKRLNFKLFNIQVKEVTQNDGTTTIANNLTSTVQVFTDSEYQLPYVLGSAHQGCLPPFPADVFMVPQYGYLTLNNGSQAVGRSSFYCLEYFPSQMLRTGNNFTFSYTFEDVPFHSSYAHSQSLDRLMNPLIDQYLYYLSRTNTPSGTTTQSRLQFSQAGASDIRDQSRNWLPGPCYRQQRVSKTSADNNNSEYSWTGATKYHLNGRDSLVNPGPAMASHKDDEEKFFPQSGVLIFGKQGSEKTNVDIEKVMITDEEEIRTTNPVATEQYGSVSTNLQRGNRQAATADVNTQGVLPGMVWQDRDVYLQGPIWAKIPHTDGHFHPSPLMGGFGLKHPPPQILIKNTPVPANPSTTFSAAKFASFITQYSTGQVSVEIEWELQKENSKRWNPEIQYTSNYNKSVNVDFTVDTNGVYSEPRPIGTRYLTRNL

SEQ ID NO: 4051 - protein, 735 aa, Artificial Sequence
  Description of Artificial Sequence: Synthetic polypeptide
MAADGYLPDWLEDILSEGIRQWWKLKPGPPPPKPAERHKDASRGLVLPGYKYLGPFNGLDKGEPVNEADAAALEHDKAYDRQLDSGDNPYLKYNHADAEFQERLKEDTSFGGNLGRAVFQAKKRVLEPLGLVEEPVKTAPGKKRPVEHSPVEPDSSSGTGKAGQQPARKRLNFGQTGDADSVPDPQPLGQPPAAPTSLGSTTMATGSGAPMADNNEGADGVGNSSGNWHCDSQWLGDRVITTSTRTWALPTYNNHLYKQISSQSGASNDNHYFGYSTPWGYFDFNRFHCHFSPRDWQRLINNNWGFRPKRLNFKLFNIQVKEVTQNDGTTTIANNLTSTVQVFTDSEYQLPYVLGSAHQGCLPPFPADVFMVPQYGYLTLNNGSQAVGRSSFYCLEYFPSQMLRTGNNFTFSYTFEDVPFHSSYAHSQSLDRLMNPLIDQYLYYLSRTNTPSGTTTQSRLQFSQAGASDIRDQSRNWLPGPCYRQQRVSKTSADNNNSEYSWTGATKYHLNGRDSLVNPGPAMASHKDDEEKFFPQSGVLIFGKQGSEKTNVDIEKVMITDEEEIRTTNPVATEQYGSVSTNLQRGNRQAATADVNTQGVLPGMVWQDRDVYLQGPIWAKIPHTDGHFHPSPLMGGFGLKHPPPQILIKNTPVPANPSTTFSAAKFASFITQYSTGQVSVEIEWELQKENSKRWNPEIQYTSNYNKSVNVDFTVDTNGVYSEPRPIGTRYLTRNL

SEQ ID NO: 4052 - protein, 735 aa, Artificial Sequence
  Description of Artificial Sequence: Synthetic polypeptide
MAADGYLPDWLEDTLSEGIRQWWKLKPGPPPPKPAERHKDASRGLVLPGYKYLGPFNGLDKGEPVNEADAAALEHDKAYDRQLDSGDNPYLKYNHADAEFQERLKEDTSFGGNLGRAVFQAKKRVLEPLGLVEEPVKTAPGKKRPVEHSPVEPDSSSGTGKAGQQPARKRLNFGQTGDADSVPDPQPLGQPPAAPSGLGTNTMATGSGAPMADNNEGADGVGNSSGNWHCDSTWMGDRVITTSTRTWALPTYNNHLYKQISSQSGASNDNHYFGYSTPWGYFDFNRFHCHFSPRDWQRLINNNWGFRPKRLNFKLFNIQVKEVTQNDGTTTIANNLTSTVQVFTDSEYQLPYVLGSAHQGCLPPFPADVFMVPQYGYLTLNNGSQAVGRSSFYCLEYFPSQMLRTGNNFTFSYTFEDVPFHSSYAHSQSLDRLMNPLIDQYLYYLSRTNTPSGTTTQSRLQFSQAGASDIRDQSRNWLPGPCYRQQRVSKTSADNNNSEYSWTGATKYHLNGRDSLVNPGPAMASHKDDEEKFFPQSGVLIFGKQGSEKTNVDIEKVMITDEEEIRTTNPVATEQYGSVSTNLQRGNRQAATADVNTQGVLPGMVWQDRDVYLQGPIWAKIPHTDGHFHPSPLMGGFGLKHPPPQILIKNTPVPANPSTTFSAAKFASFITQYSTGQASVEIEWELQKENSKRWNPEIQYTSNYNKSVNVDFTVDTNGVYSEPRPIGTRYLTRNL

SEQ ID NO: 4053 - protein, 735 aa, Artificial Sequence
  Description of Artificial Sequence: Synthetic polypeptide
MAADGYLPDWLEDTLSEGIRQWWKLKPGPPPPKPAERHKDDSRGLVLPGYKYLGPFNGLDKGEPVNEADAAALEHDKAYDRQLDSGDNPYLKYNHADAEFQERLKEDTSFGGNLGRAVFQAKKRVLEPLGLVEEPVKTAPGKKRPVEHSPVEPDSSSGTGKAGQQPARKRLNFGQTGDADSVPDPQPLGQPPAAPTSLGSTTMATGSGAPMADNNEGADGVGNSSGNWHCDSTWMGDRVITTSTRTWALPTYNNHLYKQISSQSGASNDNHYFGYSTPWGYFDFNRFHCHFSPRDWQRLINNNWGFRPKRLNFKLFNIQVKEVTQNDGTTTIANNLTSTVQVFTDSEYQLPYVLGSAHQGCLPPFPADVFMVPQYGYLTLNNGSQAVGRSSFYCLEYFPSQMLRTGNNFTFSYTFEDVPFHSSYAHSQSLDRLMNPLIDQYLYYLSRTNTPSGTTTQSRLQFSQAGASDIRDQSRNWLPGPCYRQQRVSKTSADNNNSEYSWTGATKYHLNGRDSLVNPGPAMASHKDDEEKFFPQSGVLIFGKQGSEKTNVDIEKVMITDEEEIRTTNPVATEQYGSVSTNLQRGNRQAATADVNTQGVLPGMVWQDRDVYLQGPIWAKIPHTDGHFHPSPLMGGFGLKHPPPQILIKNTPVPANPSTTFSAAKFASFITQYSTGQASVEIEWELQKENSKRWNPEIQYTSNYNKSVNVDFTVDTNGVYSEPRPIGTRYLTRNL

SEQ ID NO: 4054 - protein, 735 aa, Artificial Sequence
  Description of Artificial Sequence: Synthetic polypeptide
MAADGYLPDWLEDTLSEGIRQWWKLKPGPPPPKPAERHKDASRGLVLPGYKYLGPFNGLDKGEPVNEADAAALEHDKAYDRQLDSGDNPYLKYNHADAEFQERLKEDTSFGGNLGRAVFQAKKRVLEPLGLVEEPVKTAPGKKRPVEHSPVEPDSSSGTGKAGQQPARKRLNFGQTGDADSVPDPQPLGQPPAAPSGLGTNTMATGSGAPMADNNEGADGVGNSSGNWHCDSTWMGDRVITTSTRTWALPTYNNHLYKQISSQSGASNDNHYFGYSTPWGYFDFNRFHCHFSPRDWQRLINNNWGFRPKRLNFKLFNIQVKEVTQNDGTTTIANNLTSTVQVFTDSEYQLPYVLGSAHQGCLPPFPADVFMVPQYGYLTLNNGSQAVGRSSFYCLEYFPSQMLRTGNNFTFSYTFEDVPFHSSYAHSQSLDRLMNPLIDQYLYYLSRTNTPSGTTTQSRLQFSQAGASDIRDQSRNWLPGPCYRQQRVSKTSADNNNSEYSWTGATKYHLNGRDSLVNPGPAMASHKDDEEKFFPQSGVLIFGKQGSEKTNVDIEKVMITDEEEIRTTNPVATEQYGSVSTNLQRGNRQAATADVNTQGVLPGMVWQDRDVYLQGPIWAKIPHTDGHFHPSPLMGGFGLKHPPPQILIKNTPVPANPSTTFSAAKFASFITQYSTGQVSVEIEWELQKENSKRWNPEIQYTSNYNKSVNVDFTVDTNGVYSEPRPIGTRYLTRNL

SEQ ID NO: 4055 - protein, 735 aa, Artificial Sequence
  Description of Artificial Sequence: Synthetic polypeptide
MAADGYLPDWLEDTLSEGIRQWWKLKPGPPPPKPAERHKDASRGLVLPGYKYLGPFNGLDKGEPVNEADAAALEHDKAYDRQLDSGDNPYLKYNHADAEFQERLKEDTPFGGNLGRAVFQAKKRVLEPLGLVEEPVKTAPGKKRPVEHSPVEPDSSSGTGKAGQRPARKRLNFGQTGDADSVPDPQPLGQPPAAPTSLGSTTMATGSGAPMADNNEGADGVGNSSGNWHCDSQWLGDRVITTSTRTWALPTYNNHLYKQIPSQSGASNDNHYFGYSTPWGYFDFNRFHCHFSPRDWQRLINNNWGFRPKRLNFKLFNIQVKEVTQNDGTTTIANNLTSTVQVFTDSEYQLPYVLGSAHQGCLPPFPADVFMVPQYGYLTLNNGSQAVGRSSFYCLEYFPSQMLRTGNNFTFSYTFEDVPFHSSYAHSQSLDRLMNPLIDQYLYYLSRTNTPSGTTTQSRLQFSQAGASDIRDQSRNWLPGPCYRQQRVSKTSADNNNSEYSWTGATKYHLNGRDSLVNPGPAMASHKDDEEKFFPQSGVLIFGKQGSEKTNVDIEKVMITDEEEIRTTNPVATEQYGSVSTNLQRGNRQAATADVNTQGVLPGMVWQDRDVYLQGPIWAKIPHTDGHFHPSPLMGGFGLKHPPPQILIKNTPVPANPSTTFSAAKFASFITQYSTGQASVEIEWELQKENSKRWNPEIQYTSNYNKSVNVDFTVDTNGVYSEPRPIGTRYLTRNL

SEQ ID NO: 4056 - protein, 735 aa, Artificial Sequence
  Description of Artificial Sequence: Synthetic polypeptide
MAADGYLPDWLEDTLSEGIRQWWKLKPGPPPPKPAERHKDDSRGLVLPGYKYLGPFNGLDKGEPVNEADAAALEHDKAYDRQLDSGDNPYLKYNHADAEFQERLKEDTSFGGNLGRAVFQAKKRVLEPLGLVEEPVKTAPGKKRPVEHSPVEPDSSSGTGKAGQQPARKRLNFGQTGDADSVPDPQPLGQPPAAPTSLGSTTMATGSGAPMADNNEGADGVGNSSGNWHCDSTWMGDRVITTSTRTWALPTYNNHLYKQISSQSGASNDNHYFGYSTPWGYFDFNRFHCHFSPRDWQRLINNNWGFRPKRLNFKLFNIQVKEVTQNDGTTTIANNLTSTVQVFTDSEYQLPYVLGSAHQGCLPPFPADVFMVPQYGYLTLNNGSQAVGRSSFYCLEYFPSQMLRTGNNFTFSYTFEDVPFHSSYAHSQSLDRLMNPLTDQYLYYLSRTNTPSGTTTQSRLQFSQAGASDIRDQSRNWLPGPCYRQQRVSKTSADNNNSEYSWTGATKYHLNGRDSLVNPGPAMASHKDDEEKFFPQSGVLIFGKQGSEKTNVDIEKVMITDEEEIRTTNPVATEQYGSVSTNLQRGNRQAATADVNTQGVLPGMVWQDRDVYLQGPIWAKIPHTDGHFHPSPLMGGFGLKHPPPQILIKNTPVPANPSTTFSAAKFASFITQYSTGQVSVEIEWELQKENSKRWNPEIQYTSNYNKSVNVDFTVDTNGVYSEPRPIGTRYLTRNL

SEQ ID NO: 4057 - protein, 735 aa, Artificial Sequence
  Description of Artificial Sequence: Synthetic polypeptide
MAADGYLPDWLEDTLSEGIRQWWKLKPGPPPPKPAERHKDDSRGLVLPGYKYLGPFNGLDKGEPVNEADAAALEHDKAYDRQLDSGDNPYLKYNHADAEFQERLKEDTSFGGNLGRAVFQAKKRVLEPLGLVEEPVKTAPGKKRPVEHSPVEPDSSSGTGKAGQQPARKRLNFGQTGDADSVPDPQPLGQPPAAPSGLGTNTMATGSGAPMADNNEGADGVGNSSGNWHCDSTWMGDRVITTSTRTWALPTYNNHLYKQISSQSGASNDNHYFGYSTPWGYFDFNRFHCHFSPRDWQRLINNNWGFRPKRLNFKLFNIQVKEVTQNDGTTTIANNLTSTVQVFTDSEYQLPYVLGSAHQGCLPPFPADVFMVPQYGYLTLNNGSQAVGRSSFYCLEYFPSQMLRTGNNFTFSYTFEDVPFHSSYAHSQSLDRLMNPLIDQYLYYLSRTNTPSGTTAQSRLQFSQAGASDIRDQSRNWLPGPCYRQQRVSKTSADNNNSEYSWTGATKYHLNGRDSLVNPGPAMASHKDDEEKFFPQSGVLIFGKQGSEKTNVDIEKVMITDEEEIRTTNPVATEQYGSVSTNLQRGNRQAATADVNTQGVLPGMVWQDRDVYLQGPIWAKIPHTDGHFHPSPLMGGFGLKHPPPQILIKNTPVPANPSTTFSAAKFASFITQYSTGQVSVEIEWELQKENSKRWNPEIQYTSNYNKSVNVDFTVDTNGVYSEPRPIGTRYLTRNL

SEQ ID NO: 4058 - protein, 735 aa, Artificial Sequence
  Description of Artificial Sequence: Synthetic polypeptide
MAADGYLPDWLEDTLSEGIRQWWKLKPGPPPPKPAERHKDDSRGLVLPGYKYLGPFNGLDKGEPVNEADAAALEHDKAYDRQLDSGDNPYLKYNHADAEFQERLKEDTSFGGNLGRAVFQAKKRVLEPLGLVEEPVKTAPGKKRPVEHSPVEPDSSSGTGKAGQQPARKRLNFGQTGDADSVPDPQPLGQPPAAPSGLGTNTMATGSGAPMADNNEGADGVGNSSGNWHCDSTWMGDRVITTSTRTWALPTYNNHLYKQISSQSGASNGNHYFGYSTPWGYFDFNRFHCHFSPRDWQRLINNNWGFRPKRLNFKLFNIQVKEVTQNDGTTTIANNLTSTVQVFTDSEYQLPYVLGSAHQGCLPPFPADVFMVPQYGYLTLNNGSQAVGRSSFYCLEYFPSQMLRTGNNFTFSYTFEDVPFHSSYAHSQSLDRLMNPLIDQYLYYLSRTNTPSGTTTQSRLQFSQAGASDIRDQSRNWLPGPCYRQQRVSKTSADNNNSEYSWTGATKYHLNGRDSLVNPGPAMASHKDDEEKFFPQSGVLIFGKQGSEKTNVDIEKVMITDEEEIRTTNPVATEQYGSVSTNLQRGNRQAATADVNTQGVLPGMVWQDRDVYLQGPIWAKIPHTDGHFHPSPLMGGFGLKHPPPQILIKNTPVPANPSTTFSAAKFASFITQYSTGQVSVEIEWELQKENSKRWNPEIQYTSNYNKSVNVDFTVDTNGVYSEPRPIGTRYLTRNL

SEQ ID NO: 4059 - protein, 735 aa, Artificial Sequence
  Description of Artificial Sequence: Synthetic polypeptide
MAADGYLPDWLEDTLSEGIRQWWKLKPGPPPPKPAERHKDDSRGLVLPGYKYLGPFNGLDKGEPVNEADAAALEHDKAYDRQLDSGDNPYLKYNHADAEFQERLKEDTSFGGNLGRAVFQAKKRVLEPLGLVEEPVKTAPGKKRPVEHSPVEPDSSSGTGKAGQQPARKRLNFGQTGDADSVPDPQPLGQPPAAPSGLGTNTMATGSGAPMADNNEGADGVGNSSGNWHCDSTWMGDRVITTSTRTWALPTYNNHLYKQISSQSGASNDNHYFGYSTPWGYFDFNRFHCHFSPRDWQRLINNNWGFRPKRLNFKLFNIQVKEVTQNDGTTTIANNLTSTVQVFTDSEYQLPYVLGSAHQGCLPPFPADVFMVPQYGYLTLNNGSQAVGRSSFYCLEYFPSQMLRTGNNFTFSYTFEDVPFHSSYAHSQSLDRLMNPLIDQYLYYLSRTNTPSGTTTQSRLQFSQAGASDIRDQSRNWLPGPCYRQQRVSKTSADNNNSEYSWTGATKYHLNGRDSLVNPGPAMASHKDDEEKFFPQSGVLIFGKQGSEKTNVDIERVMITDEEEIRTTNPVATEQYGSVSTNLQRGNRQAATADVNTQGVLPGMVWQDRDVYLQGPIWAKIPHTDGHFHPSPLMGGFGLKHPPPQILIKNTPVPANPSTTFSAAKFASFITQYSTGQVSVEIEWELQKENSKRWNPEIQYTSNYNKSVNVDFTVDTNGVYSEPRPIGTRYLTRNL

SEQ ID NO: 4060 - protein, 735 aa, Artificial Sequence
  Description of Artificial Sequence: Synthetic polypeptide
MAADGYLPDWLEDTLSEGIRQWWKLKPGPPPPKPAERHKDDSRGLVLPGYKYLGPFNGLDKGEPVNEADAAALEHDKAYDRQLDSGDNPYLKYNHADAEFQERLKEDTSFGGNLGRAVFQAKKRVLEPLGLVEEPVKTAPGKKRPVEHSPVEPDSSSGTGKAGQQPARKRLNFGQTGDADSVPDPQPLGQPPAAPSGLGTNTMATGSGAPMADNNEGADGVGNSSGNWHCDSTWMGDRVITTSTRTWALPTYNNHLYKQISSQSGASNDNHCFGYSTPWGYFDFNRFHCHFSPRDWQRLINNNWGFRPKRLNFKLFNIQVKEVTQNDGTTTIANNLTSTVQVFTDSEYQLPYVLGSAHQGCLPPFPADVFMVPQYGYLTLNNGSQAVGRSSFYCLEYFPSQMLRTGNNFTFSYTFEDVPFHSSYAHSQSLDRLMNPLIDQYLYYLSRTNTPSGTTTQSRLQFSQAGASDIRDQSRNWLPGPCYRQQRVSKTSADNNNSEYSWTGATKYHLNGRDSLVNPGPAMASHKDDEEKFFPQSGVLIFGKQGSEKTNVDIEKVMITDEEEIRTTNPVATEQYGSVSTNLQRGNRQAATADVNTQGVLPGMVWQDRDVYLQGPIWAKIPHTDGHFHPSPLMGGFGLKHPPPQILIKNTPVPANPSTTFSAAKFASFITQYSTGQVSVEIEWELQKENSKRWNPEIQYTSNYNKSVNVDFTVDTNGVYSEPRPIGTRYLTRNL

SEQ ID NO: 4061 - protein, 735 aa, Artificial Sequence
  Description of Artificial Sequence: Synthetic polypeptide
MAADGYLPDWLEDTLSEGIRQWWKLKPGPPPPKPAERHKDDSRGLVLPGYKYLGPFNGLDKGEPVNEADAAALEHDKAYDRQLDSGDNPYLKYNHADAEFQERLKEDTSFGGNLGRAVFQAKKRVLEPLGLVEEPVKTAPGKKRPVEHSPVEPDSSSGTGKAGQQPARKRLNFGQTGDADSVPDPQPLGQPPAAPSGLGTNTMATGSGAPMADNNEGADGVGNSSGNWHCDSTWMGDRVITTSTRTWALPTYNNHLYKQISSQSGASNDNHYFGYSTPWGYFDFNRFHCHFSPRDWQRLINNNWGFRPKRLNFKLFNIQVKEVTQNDGTTTIANNLTSTVQVFTDSEYQLPYVLGSAHQGCLPPFPADVFMVPQYGYLTLNNGSQAVGRSSFYCLEYFPSQMLRTGNNFTFSYTFEDVPFHSSYAHSQSLDRLMNPLIDQYLYYLSRTNTPSGTTTQSRLQFSQAGASDIRDQSRNWLPGPCYRQQRVSKTSADNNNSEYSWTGATKYHLNGRDSLVNPGPAMASHKDDEEKFFPQSGVLIFGKQGSEKTNVDIEKVMITDEEEIRTTNPVATEQYGSVSTNLQRGNRQAATADVNTQGVLPGMVWQDRDVYLQGPIWAKIPHTDGHFHPSPLMGGFGLKHPPPQILIKNTPVPANPSTTFSAAKFASFITQYSTGQVSVEIEWELQKENSKRWNPEIQYTSNYNKSVNADFTVDTNGVYSEPRPIGTRYLTRNL

SEQ ID NO: 4062 - protein, 735 aa, Artificial Sequence
  Description of Artificial Sequence: Synthetic polypeptide
MAADGYLPDWLEDTLSEGIRQWWKLKPGPPPPKPAERHRDDSRGLVLPGYKYLGPFNGLDKGEPVNEADAAALEHDKAYDRQLDSGDNPYLKYNHADAEFQERLKEDTSFGGNLGRAVFQAKKRVLEPLGLVEEPVKTAPGKKRPVEHSPVEPDSSSGTGKAGQQPARKRLNFGQTGDADSVPDPQPLGQPPAAPSGLGTNTMATGSGAPMADNNEGADGVGNSSGNWHCDSTWMGDRVITTSTRTWALPTYNNHLYKQISSQSGASNGNHYFGYSTPWGYFDFNRFHCHFSPRDWQRLINNNWGFRPKRLNFKLFNIQVKEVTQNDGTTTIANNLTSTVQVFTDSEYQLPYVLGSAHQGCLPPFPADVFMVPQYGYLTLNNGSQAVGRSSFYCLEYFPSQMLRTGNNFTFSYTFEDVPFHSSYAHSQSLDRLMNPLIDQYLYYLSRTNTPSGTTTQSRLQFSQAGASDIRDQSRNWLPGPCYRQQRVSKTSADNNNSEYSWTGATKYHLNGRDSLVNPGPAMASHKDDEEKFFPQSGVLIFGKQGSEKTNVDIEKVMITDEEEIRTTNPVATEQYGSVSTNLQRGNRQAATADVNTQGVLPGMVWQDRDVYLQGPIWAKIPHTDGHFHPSPLMGGFGLKHPPPQILIKNTPVPANPSTTFSAAKFASFITQYSTGQVSVEIEWELQKENSKRWNPEIQYTSNYNKSVNVDFTVDTNGVYSEPRPIGTRYLTRNL

SEQ ID NO: 4063 - protein, 735 aa, Artificial Sequence
  Description of Artificial Sequence: Synthetic polypeptide
MAADGYLPDWLEDTLSEGIRQWWKLKPGPPPPKPAERHKDDSRGLVLPGYKYLGPFNGLDKGEPVNEADAAALEHDKAYDRQLDSGDNPYLKYNHADAEFQERLKEDTSFGGNLGRAVFQAKKRVLEPLGLVEEPVKTAPGKKRPVEHSPVEPDSSSGTGKAGQQPARKRLNFGQTGDADSVPDPQPLGQPPAAPSGLGTNTMATGSGAPMADNNEGADGVGNSSGNWHCDSTWMGDRVITTSTRTWALPTYNNHLYKQISSQSGASNDNHYFGYSTPWGYFDFNRFHCHFSPRDWQRLINNNWGFRPKRLNFKLFNIQVKEVTQNDGTTTIANNLTSTVQVFTDSEYQLPYVLGSAHQGCLPPFPADVFMVPQYGYLTLNNGSRAVGRSSFYCLEYFPSQMLRTGNNFTFSYTFEDVPFHSSYAHSQSLDRLMNPLIDQYLYYLSRTNTPSGTTTQSRLQFSQAGASDIRDQSRNWLPGPCYRQQRVSKASADNNNSEYSWTGATKYHLNGRDSLVNPGPAMASHKDDEEKFFPQSGVLIFGKQGSEKTNVDIEKVMITDEEEIRTTNPVATEQYGSVSTNLQRGNRQAATADVNTQGVLPGMVWQDRDVYLQGPIWAKIPHTDGHFHPSPLMGGFGLKHPPPQILIKNTPVPANPSTTFSAAKFASFITQYSTGQVSVEIEWELQKENSKRWNPEIQYTSNYNKSVNVDFTVDTNGVYSEPRPIGTRYLTRNL

SEQ ID NO: 4064 - protein, 735 aa, Artificial Sequence
  Description of Artificial Sequence: Synthetic polypeptide
MAADGYLPDWLEDTLSEGIRQWWKLKPGPPPPKPAERHRDDSRGLVLPGYKYLGPFNGLDKGEPVNEADAAALEHDKAYDRQLDSGDNPYLKYNHADAEFQERLKEDTSFGGNLGRAVFQAKKRVLEPLGLVEEPVKTAPGKKRPVEHSPVEPDSSSGTGKAGQQPARKRLNFGQTGDADSVPDPQPLGQPPAAPSGLGTNTMATGSGAPMADNNEGADGVGNSSGNWHCDSTWMGDRVITTSTRTWALPTYNNHLYKQISSQSGASNGNHYFGYSTPWGYFDFNRFHCHFSPRDWQRLINNNWGFRPKRLNFKLFNIQVKEVTQNDGTTTIANNLTSTVQVFTDSEYQLPYVLGSAHQGCLPPFPADVFMVPQYGYLTLNNGSQAVGRSSFYCLEYFPSQMLRTGNNFTFSYTFEDVPFHSSYAHSQSLDRLMNPLIDQYLYYLSRTNTPSGTTTQSRLQFSQAGASGIRDQSRNWLPGPCYRQQRVSKTSADNNNSEYSWTGATKYHLNGRDSLVNPGPAMASHKDDEEKFFPQSGVLIFGKQGSEKTNVDIEKVMITDEEEIRTTNPVATEQYGSVSTNLQRGNRQAATADVNTQGVLPGMVWQDRDVYLQGPIWAKIPHTDGHFHPSPLMGGFGLKHPPPQILIKNTPVPANPSTTFSAAKFASFITQYSTGQVSVEIEWELQKENSKRWNPEIQYTSNYNKSVNVDFTVDTNGVYSEPRPIGTRYLTRNL

SEQ ID NO: 4065 - protein, 735 aa, Artificial Sequence
  Description of Artificial Sequence: Synthetic polypeptide
MAADGYLPDWLEDTLSEGIRQWWKLKPGPPPPKPAERHRDDSRGLVLPGYKYLGPFNGLDKGEPVNEADAAALEHDKAYDRQLDSGDNPYLKYNHADAEFQERLKEDTSFGGNLGRAVFQAKKRVLEPLGLVEEPVKTAPGKKRPVEHSPVEPDSSSGTGKAGQQPARKRLNFGQTGDADSVPDPQPLGQPPAAPSGLGTNTMATGSGAPMADNNEGADGVGNSSGNWHCDSTWMGDRVITTSTRTWALPTYNNHLYKQISSQSGASNGNHYFGYSTPWGYFDFNRFHCHFSPRDWQRLINNNWGFRPKRLNFKLFNIQVKEVTQNDGTTTIANNLTSTVQVFTDSEYQLPYVLGSAHQGCLPPFPADVFMVPQYGYLTLNNGSQAVGRSSFYCLEYFPSQMLRTGNNFTFSYTFEDVPFHSNYAHSQSLDRLMNPLIDQYLYYLSRTNTPSGTTTQSRLQFSQAGASDIRDQSRNWLPGPCYRQQRVSKTSADNNNSEYSWTGATKYHLNGRDSLVNPGPAMASHKDDEEKFFPQSGVLIFGKQGSEKTNVDIEKVMITDEEEIRTTNPVATEQYGSVSTNLQRGNRQAATADVNTQGVLPGMVWQDRDVYLQGPIWAKIPHTDGHFHPSPLMGGFGLKHPPPQILIKNTPVPANPSTTFSAAKFASFITQYSTGQVSVEIEWELQKENSKRWNPEIQYTSNYNKSVNVDFTVDTNGVYSEPRPIGTRYLTRNL

SEQ ID NO: 4066 - protein, 735 aa, Artificial Sequence
  Description of Artificial Sequence: Synthetic polypeptide
MAADGYLPDWLEDTLSEGIRQWWKLKPGPPPPKPAERHKDDSRGLVLPGYKYLGPFNGLDKGEPVNEADAAALEHDKAYDRQLDSGDNPYLKYNHADAEFQERLKEDTSFGGNLGRAVFQAKKRVLEPLGLVEEPVKTAPGKKRPVEHSPVEPDSSSGTGKAGQQPARKRLNFGQTGDADSVPDPQPLGQPPAAPSGLGTNTMATGSGAPMADNNEGADGVGNSSGNWHCDSTWMGDRVITTSTRTWALPTYNNHLYKQISSQSGASNDNHYFGYSTPWGYFDFNRFHCHFSPRDWQRLINNNWGFRPKRLNFKLFNIQVKEVTQNDGTTTIANNLTSTVQVFTDSEYQLPYVLGSAHQGCLPPFPADVFMVPQYGYLTLNNGSQAVGRSSFYCLEYFPSQMLRTGNNFTFSYTFEDVPFHSSYAHSQSLDRLMNPLIDQYLYYLSRTNTPSGTTTQSRLQFSQAGASDIRDQSRNWLPGPCYRQQRVSKTSADNNNSEYSWTGATKYHLNGRDSLVNPGPAMASHKDDEEKFFPQSGVLIFGKQGSEKTNVDIEKVMITDEEEIRTTNPVATEQYGSVSTNLQRGNRQAATADVNTQGVLPGMVWQDRDVYLQGPIWAKIPHTDGHFHPSPLMGGFGLKHPPPQILIKNTPVPANPSTTFSAAKFASFITQYSAGQVSVEIEWELQKENSKRWNPEIQYTSNYNKSVNVDFTVDTNGVYSEPRPIGTRYLTRNL

SEQ ID NO: 4067 - protein, 735 aa, Artificial Sequence
  Description of Artificial Sequence: Synthetic polypeptide
MAADGYLPDWLEDTLSEGIRQWWKLKPGPPPPKPAERHKDDSRGLVLPGYKYLGPFNGLDKGEPVNEADAAALEHDKAYDRQLDSGDNPYLKYNHADAEFQERLKEDTSFGGNLGRAVFQAKKRVLEPLGLVEEPVKTAPGKKRPVEHSPVEPDSSSGTGKAGQQPARKRLNFGQTGDADSVPDPQPLGQPPAAPSGLGTNTMATGSGAPMADNNEGADGVGNSSGNWHCDSTWMGDRVITTSTRTWALPTYNNHLYKQISSQSGASNDNHYFGYSTPWGYFDFNRFHCHFSPRDWQRLINNNWGFRPKRLNFKLFNIQVKEVTQNDGTTTIANNLTSTVQVFTDSEYQLPYVLGSAHQGCLPPFPADVFMVPQYGYLTLNNGSQAVGRSSFYCLEYFPSQMLRTGNNFTFSYTFEDVPFHSSYAHSQSLDRLMNPLIDQYLYYLSRTNTPSGTTTQSRLQFSQAGASDIRDQSRNWLPGPCYRQQRVSKTSADNNNSEYSWTGATKYHLNGRDSLVNPGPAMASHKDDEEKFFPQSGVLIFGKQGSEKTNVDIEKVMITDEEEIRTTNPVATEQYGSVSTNLQRGNRQAATADVNTQGVLPGMVWQDRDVYLQGPIWAKIPHTDGHFHPSPLMGGFGLKHPPPQILIKNTPVPANPSTTFSAAKFASFITQYSTGQVSVEIEWELQKENSKRWNPEIQYTSNYNKSVNVDFTVDTDGVYSEPRPIGTRYLTRNL

SEQ ID NO: 4068 - protein, 735 aa, Artificial Sequence
  Description of Artificial Sequence: Synthetic polypeptide
MAADGYLPDWLEDTLSEGIRQWWKLKPGPPPPKPAERHKDDSRGLVLPGYKYLGPFNGLDKGEPVNEADAAALEHDKAYDRQLDSGDNPYLKYNHADAEFQERLKEDTSFGGNLGRAVFQAKKRVLEPLGLVEEPVKTAPGKKRPVEHSPVEPDSSSGTGKAGQQPARKRLNFGQTGDADSVPDPQPLGQPPAAPSGLGTNTMATGSGAPMADNNEGADGVGNSSGNWHCDSTWMGDRVITTSTRTWALPTYNNHLYKQISSQSGASNDNHYFGYSTPWGYFDFNRFHCHFSPRDWQRLINNNWGFRPKRLNFKLFNIQVKEVTQNDGTTTIANNLTSTVQVFTDSEYQLPYVLGSAHQGCLPPFPADVFMVPQYGYLTLNNGSQAVGRSSFYCLEYFPSQMLRTGNNFTFSYTFEDVPFHSSYAHSQSLDRLMNPLIDQYLYYLSRTNTPSGTTTQSRLQFSQAGASDIRDQSRNWLPGPCYRQQRVSKTSADNNNSEYSWTGATKYHLNGRDSLVNPGPAMASHKDDEEKFFPQSGVLIFGKQGSEKTNVDIEKVMITDEEEIRTTNPVATEQYGSVSTNLQRGNRQAATADVNTQGVLPGMVWQGRDVYLQGPIWAKIPHTDGHFHPSPLMGGFGLKHPPPQILIKNTPVPANPSTTFSAAKFASFITQYSTGQVSVEIEWELQKENSKRWNPEIQYTSNYNKSVNVDFTVDTNGVYSEPRPIGTRYLTRNL

SEQ ID NO: 4069 - protein, 735 aa, Artificial Sequence
  Description of Artificial Sequence: Synthetic polypeptide
MAADGYLPDWLEDTLSEGIRQWWKLKPGPPPPKPAERHKDDSRGLVLPGYKYLGPFNGLDKGEPVNEADAAALEHDKAYDRQLDSGDNPYLKYNHADAEFQERLKEDTSFGGNLGRAVFQAKKRVLEPLGLVEEPVKTAPGKKGPVEHSPVEPDSSSGTGKAGQQPARKRLNFGQTGDADSVPDPQPLGQPPAAPSGLGTNTMATGSGAPMADNNEGADGVGNSSGNWHCDSTWMGDRVITTSTRTWALPTYNNHLYKQISSQSGASNDNHYFGYSTPWGYFDFNRFHCHFSPRDWQRLINNNWGFRPKRLNFKLFNIQVKEVTQNDGTTTIANNLTSTVQVFTDSEYQLPYVLGSAHQGCLPPFPADVFMVPQYGYLTLNNGSQAVGRSSFYCLEYFPSQMLRTGNNFTFSYTFEDVPFHSSYAHSQSLDRLMNPLIDQYLYYLSRTNTPSGTTTQSRLQFSQAGASDIRDQSRNWLPGPCYRQQRVSKTSADNNNSEYSWTGATKYHLNGRDSLVNPGPAMAGHKDDEEKFFPQSGVLIFGKQGSEKTNVDIEKVMITDEEEIRTTNPVATEQYGSVSTNLQRGNRQAATADVNTQGVLPGMVWQDRDVYLQGPIWAKIPHTDGHFHPSPLMGGFGLKHPPPQILIKNTPVPANPSTTFSAAKFASFITQYSTGQVSVEIEWELQKENSKRWNPEIQYTSNYNKSVNVDFTVDTNGVYSEPRPIGTRYLTRNL

SEQ ID NO: 4070 - protein, 735 aa, Artificial Sequence
  Description of Artificial Sequence: Synthetic polypeptide
MAADGYLPDWLEDTLSEGIRQWWKLKPGPPPPKPAERHKDDSRGLVLPGYKYLGPFNGLDKGEPVNEADAAALEHDKAYDRQLDSGDNPYLKYNHADAEFQERLKEDTSFGGNLGRAVFQAKKRVLEPLGLVEEPVKTAPGKKRLVEHSPVEPDSSSGTGKAGQQPARKRLNFGQTGDADSVPDPQPLGQPPAAPSGLGTNTMATGSGAPMADNNEGADGVGNSSGNWHCDSTWMGDRVITTSTRTWALPTYNNHLYKQISSQSGASNDNHYFGYSTPWGYFDFNRFHCHFSPRDWQRLINNNWGFRPKRLNFKLFNIQVKEVTQNDGTTTIANNLTSTVQVFTDSEYQLPYVLGSAHQGCLPPFPADVFMVPQYGYLTLNNGSQAVGRSSFYCLEYFPSQMLRTGNNFTFSYTFEDVPFHSSYAHSQSLDRLMNPLIDQYLYYLSRTNTPSGTTTQSRLQFSQAGASDIRDQSRNWLPGPCYRQQRVSKTSADNNNSEYSWTGATKYHLNGRDSLVNPGPAMASHKDDEEKFFPQSGVLIFGKQGSEKTNVDIEKVMITDEEEIRTTNPVATEQYGSVSTNLQRGNRQAATADVNTQGVLPGMVWQDRDVYLQGPIWAKIPHTDGHFHPSPLMGGFGLKHPPPQILIKNTPVPANPSTTFSAAKFASFITQYSTGQVSVEIEWELQKENSKRWNPEIQYTSNYNKSVNVDFTVDTNGVYSEPRPIGTRYLTRNL

SEQ ID NO: 4071 - protein, 735 aa, Artificial Sequence
  Description of Artificial Sequence: Synthetic polypeptide
MAADGYLPDWLEDTLSEGIRQWWKLKPGPPPPKPAERHKDDSRGLVLPGYKYLGPFNGLDKGEPVNEAGAAALKHDKAYDRQLDSGDNPYLKYNHADAEFQERLKEDTSFGGNLGRAVFQAKKRVLEPLGLVEEPVKTAPGKKRPVEHSPVEPDSSSGTGKAGQQPARKRLNFGQTGDADSVPDPQPLGQPPAAPSGLGTNTMATGSGAPMADNNEGADGVGNSSGNWHCDSTWMGDRVITTSTRTWALPTYNNHLYKQISSQSGASNDNHYFGYSTPWGYFDFNRFHCHFSPRDWQRLINNNWGFRPKRLNFKLFNIQVKEVTQNDGTTTIANNLTSTVQVFTDSEYQLPYVLGSAHQGCLPPFPADVFMVPQYGYLTLNNGSQAVGRSSFYCLEYFPSQMLRTGNNFTFSYTFEDVPFHSSYAHSQSLDRLMNPLIDQYLYYLSRTNTPSGTTTQSRLQFSQAGASDIRDQSRNWLPGPCYRQQRVSKTSADNNNSEYSWTGATKYHLNGRDSLVNPGPAMASHKDDEEKFFPQSGVLIFGKQGSEKTNVDIEKVMITDEEEIRTTNPVATEQYGSVSTNLQRGNRQAATADVNTQGVLPGMVWQDRDVYLQGPIWAKIPHTDGHFHPSPLMGGFGLKHPPPQILIKNTPVPANPSTTFSAAKFASFITQYSTGQVSVEIEWELQKENSKRWNPEIQYTSNYNKSVNVDFTVDTNGVYSEPRPIGTRYLTRNL

SEQ ID NO: 4072 - protein, 735 aa, Artificial Sequence
  Description of Artificial Sequence: Synthetic polypeptide
MAADGYLPDWLEDTLSEGIRQWWKLKPGPPPPKPAERHKDDSRGLVLPGYKYLGPFNGLDKGEPVNEADAAALEHDKAYDRQLDSGDNPYLKYNHADAEFQERLKEDTSFGGNLGRAVFQAKKRVLEPLGLVEEPVKTAPGKKRPVEHSPVEPDSSSGTGKAGQQPARKRLNFGQTGDADSVPDPQPLGQPPAAPSGLGTNTMATGSGAPMADNNEGADGVGNSSGNWHCDSTWMGDRVITTSTRTWALPTYNNHLYKQISSQSGASNDNHYFGYSTPWGYFDFNRFHCHFSPRDWQRLINNNWGFRPKRLNFKLFNIQVKEVTQNDGTTTIANNLTSTVQVFTDSEYQLPYVLGSAHQGCLPPFPADVFMVPQYGYLTLNNGSQAVGRSSFYCLEYFPSQMLRTGNNFTFSYTFEDVPFHSSYAHSQSLDRLMNPLIDQYLYYLSRTNTPSGTTTQSRLQFSQAGASGIRDQSRNWLPGPCYRQQRVSKTSADNNNSEYSWTGATKYHLNGRDSLVNPGPAMASHKDDEEKFFPQSGVLIFGKQGSEKTNVDIEKVMITDEEEIRTTNPVATEQYGSVSTNLQRGNRQAATADVNTQGVLPGMVWQDRDVYLQGPIWAKIPHTDGHFHPSPLMGGFGLKHPPPQILIKNTPVPANPSTTFSAAKFASFITQYSTGQVSVEIEWELQKENSKRWNPEIQYTSNYNKSVNVDFTVDTNGVYSEPRPIGTRYLTRNL

SEQ ID NO: 4073 - protein, 735 aa, Artificial Sequence
  Description of Artificial Sequence: Synthetic polypeptide
MAADGYLPDWLEDTLSEGIRQWWKLKPGPPPPKPAERHKDDSRGLVLPGYKYLGPFNGLDKGEPVNEADAAALEHDKAYDRQLDSGDNPYLKYNHADAEFQERLKEDTSFGGNLGRAVFQAKKRVLEPLGLVEEPVKTAPGKKRPVEHSPVEPDSSSGTGKAGQQPARKRLNFGQTGDADSVPDPQPLGQPPAAPSGLGTNTMATGSGAPMADNNEGADGVGNSSGNWHCDSTWMGDRVITTSTRTWALPTYNNHLYKQISSQSGASNDNHYFGYSTPWGYFDFNRFHCHFSPRDWQRLINNNWGFRPKRLNFKLFNIQVKEVTQNDGTTTIANNLTSTVQVFTDSEYQLPYVLGSAHQGCLPPFPADVFMVPQYGYLTLNNGSQAVGRSSFYCLEYFPSQMLRTGNNFTFSYTFEDVPFHSSYAHSQSLDRLMNPLIDQYLYYLSRANTPSGTTTQSRLQFSQAGASDIRDQSRNWLPGPCYRQQRVSKTSADNNNSEYSWTGATKYHLNGRDSLVNPGPAMASHKDDEEKFFPQSGVLIFGKQGSEKTNVDIEKVMITDEEEIRTTNPVATEQYGSVSTNLQRGNRQAATADVNTQGVLPGMVWQDRDVYLQGPIWAKIPHTDGHFHPSPLMGGFGLKHPPPQILIKNTPVPANPSTTFSAAKFASFITQYSTGQVSVEIEWELQKENSKRWNPEIQYTSNYNKSVNVDFTVDTNGVYSEPRPIGTRYLTRNL

SEQ ID NO: 4074 - protein, 735 aa, Artificial Sequence
  Description of Artificial Sequence: Synthetic polypeptide
MAADGYLPDWLEDTLSEGIRQWWKLKPGPPPPKPAERHKDDSRGLVLPGYKYLGPFNGLDKGEPVNEADAAALEHDKAYDRQLDSGDNPYLKYNHADAEFQERLKEDTSFGGNLGRAVFQAKKRVLEPLGLVEEPVKTAPGKKRPVEHSPVEPDSSSGTGKAGQQPARKRLNFGQTGDADSVPDPQPLGQPPAAPSGLGTNTMATGSGAPMADNNEGADGVGNSSGNWHCDSTWMGDRVITTSTRTRALPTYNNHLYKQISSQSGASNDNHYFGYSTPWGYFDFNRFHCHFSPRDWQRLINNNWGFRPKRLNFKLFNIQVKEVTQNDGTTTIANNLTSTVQVFTDSEYQLPYVLGSAHQGCLPPFPADVFMVPQYGYLTLNNGSQAVGRSSFYCLEYFPSQMLRTGNNFTFSYTFEDVPFHSSYAHSQSLDRLMNPLIDQYLYYLSRTNTPSGTTTQSRLQFSQAGASDIRDQSRNWLPGPCYRQQRVSKTSADNNNSEYSWTGATKYHLNGRDSLVNPGPAMASHKDDEEKFFPQSGVLIFGKQGSEKTNVDIEKVMITDEEEIRTTNPVATEQYGSVSTNLQRGNRQAATADVNTQGVLPGMVWQDRDVYLQGPIWAKIPHTDGHFHPSPLMGGFGLKHPPPQILIKNTPVPANPSTTFSAAKFASFITQYSTGQVSVEIEWELQKENSKRWNPEIQYTSNYNKSVNVDFTVDTNGVYSEPRPIGTRYLTRNL

SEQ ID NO: 4075 - protein, 735 aa, Artificial Sequence
  Description of Artificial Sequence: Synthetic polypeptide
MAADGYLPDWLEDTLSEGIRQWWKLKPGPPPPKPAERHKDDSRGLVLPGYKYLGPFNGLDKGEPVNEADAAALEHDKAYDRQLDSGDNPYLKYNHADAEFQERLKEDTSFGGNLGRAVFQAKKRVLEPLGLVEEPVKTAPGKKRPVEHSPVEPDSSSGTGKAGQQPARKRLNFGQTGDADSVPDPQPLGQPPAAPSGLGTNTMATGSGAPMADNNEGADGVGNSSGNWHCDSTWMGDRVITTSTRTWALPTYNSHLYKQISSQSGASNDNHYFGYSTPWGYFDFNRFHCHFSPRDWQRLINNNWGFRPKRLNFKLFNIQVKEVTQNDGTTTIANNLTSTVQVFTDSEYQLPYVLGSAHQGCLPPFPADVFMVPQYGYLTLNNGSQAVGRSSFYCLEYFPSQMLRTGNNFTFSYTFEDVPFHSSYAHSQSLDRLMNPLIDQYLYYLSRTNTPSGTTTQSRLQFSQAGASDIRDQSRNWLPGPCYRQQRVSKTSADNNNSEYSWTGATKYHLNGRDSLVNPGPAMASHKDDEEKFFPQSGVLIFGKQGSEKTNVDIEKVMITDEEEIRTTNPVATEQYGSVSTNLQRGNRQAATADVNTQGVLPGMVWQDRDVYLQGPIWAKIPHTDGHFHPSPLMGGFGLKHPPPQILIKNTPVPANPSTTFSAAKFASFITQYSTGQVSVEIEWELQKENSKRWNPEIQYTSNYNKSVNVDFTVDTNGVYSEPRPIGTRYLTRNL

SEQ ID NO: 4076 - protein, 735 aa, Artificial Sequence
  Description of Artificial Sequence: Synthetic polypeptide
MAADGYLPDWLEDTLSEGIRQWWKLKPGPPPPKPAERHKDDSRGLVLPGYKYLGPFNGLDKGEPVNEADAAALEHDKAYDRQLDSGDNPYLKYNHADAEFQERLKEDTSFGGNLGRAVFQAKKRVLEPLGLVEEPVKTAPGKKRPVEHSPVEPDSSSGTGKAGQQPARKRLNFGQTGDADSVPDPQPLGQPPAAPSGLGTNTMATGSGAPMADNNEGADGVGNSSGNWHCDSTWMGDRVITTSTRTWALPTYNNHLYKQISSQSGASNDNHYFGYSTPWGYFDFNRFHCHFSPRDWQRLINNNWGFRPKRLNFKLFNIQVKEVTQNDGTTTIANNLTSTVQVFTDSEYQLPYVLGSAHQGCLPPFPADVFMVPQYGYLTLNNGSQAVGRSSFYCLEYFPSQMLRTGNNFTFSYTFEDVPFHSSYAHSQSLDRLMNPLIDQYLYYLSRTNTPSGTTTQSRLQFSQAGASDIRDQSRNWLPGPCYRQQRVSKTSADNNNSEYSWTGATKYHLNGRDSLVNPGPAMASHKDDEEKFFPQSGVLIFGKQGSEKTNVDIEKVMITDEEEIRTTNPVATEQYGSVSTNLQRGNRQAATADVNTQGVLPGMVWQDRDVYLQGPIWAKIPHTDGHFHPSPLMGGFGLKRPPPQILIKNTPVPANPSTTFSAAKFASFITQYSTGQVSVEIEWELQKENSKRWNPEIQYTSNYNKSVNVDFTVDTNGVYSEPRPIGTRYLTRNL

SEQ ID NO: 4077 - protein, 735 aa, Artificial Sequence
  Description of Artificial Sequence: Synthetic polypeptide
MAADGYLPDWLEDTLSEGIRQWWKLKPGPPPPKPAERHKDDSRGLVLPGYKYLGPFNGLDKGEPVNEADAAALEHDKAYDRQLDSGDNPYLKYNHADAEFQERLKEDTSFGGNLGRAVFQAKKRVLEPLGLVEEPVKTAPGKKRPVEHSPVEPDSSSGTGKAGQQPARKRLNFGQTGDADSVPDPQPLGQPPAAPSGLGTNTMATGSGAPMADNNEGADGVGNSSGNWHCDSTWMGDRVITTSTRTWALPTYNNHLYKQISSQSGASNDNHYFGYSTPWGYFDFNRFHCHFSPRDWQRLINNNWGFRPKRLNFKLFNIQVKEVTQNDGTTTIANNLTSTVQVFTDSEYRLPYVLGSAHQGCLPPFPADVFMVPQYGYLTLNNGSQAVGRSSFYCLEYFPSQMLRTGNNFTFSYTFEDVPFHSSYAHSQSLDRLMNPLIDQYLYYLSRTNTPSGTTTQSRLQFSQAGASDIRDQSRNWLPGPCYRQQRVSKTSADNNNSEYSWTGATKYHLNGRDSLVNPGPAMASHKDDEEKFFPQSGVLIFGKQGSEKTNVDIEKVMITDEEEIRTTNPVATEQYGSVSTNLQRGNRQAATADVNTQGVLPGMVWQDRDVYLQGPIWAKIPHTDGHFHPSPLMGGFGLKHPPPQILIKNTPVPANPSTTFSAAKFASFITQYSTGQVSVEIEWELQKENSKRWNPEIQYTSNYNKSVNVDFTVDTNGVYSEPRPIGTRYLTRNL

SEQ ID NO: 4078 - protein, 735 aa, Artificial Sequence
  Description of Artificial Sequence: Synthetic polypeptide
MAADGYLPDWLEDTLSEGIRQWWKLKPGPPPPKPAERHKDDSRGLVLPGYKYLGPFNGLDKGEPVNEADAAALEHDKAYDRQLDSGDNPYLKYNHADAEFQERLKEDTSFGGNLGRAVFQAKKRVLEPLGLVEEPVKTAPGKKRPVEHSPVEPDSSSGTGKAGQQPARKRLNFGQTGDADSVPDPQPLGQPPAAPSGLGTNTMATGSGAPMADNNEGADGVGNSSGNWHCDSTWMGDRVITTSTRTWALPTYNNHLYKQISSQSGASNDNHYFGYSTPWGYFDFNRFHCHFSPRDWQRLINNNWGFRPKRLNFKLFNIQVKEVTQNDGTTTIANNLTSTVRVFTDSEYQLPYVLGSAHQGCLPPFPADVFMVPQYGYLTLNNGSQAVGRSSFYCLEYFPSQMLRTGNNFTFSYTFEDVPFHSSYAHSQSLDRLMNPLIDQYLYYLSRTNTPSGTTTQSRLQFSQAGASDIRDQSRNWLPGPCYRQQRVSKTSADNNNSEYSWTGATKYHLNGRDSLVNPGPAMASHKDDEEKFFPQSGVLIFGKQGSEKTNVDIEKVMITDEEEIRTTNPVATEQYGSVSTNLQRGNRQAATADVNTQGVLPGMVWQDRDVYLQGPIWAKIPHTDGHFHPSPLMGGFGLKHPPPQILIKNTPVPANPSTTFSAAKFASFITQYSTGQVSVEIEWELQKENSKRWNPEIQYTSNYNKSVNVDFTVDTNGVYSEPRPIGTRYLTRNL

SEQ ID NO: 4079 - protein, 735 aa, Artificial Sequence
  Description of Artificial Sequence: Synthetic polypeptide
MAADGYLPDWLEDTLSEGIRQWWKLKPGPPPPKPAERHRDDSRGLVLPGYKYLGPFNGLDKGEPVNEADAAALEHDKAYDRQLDSGDNPYLKYNHADAEFQERLKEDTSFGGNLGRAVFQAKKRVLEPLGLVEEPVKTAPGKKRPVEHSPVEPDSSSGTGKAGQQPARKRLNFGQTGDADSVPDPQPLGQPPAALSGLGTNTMATGSGAPMADNNEGADGVGNSSGNWHCDSTWMGDRVITTSTRTWALPTYNNHLYKQISSQSGASNGNHYFGYSTPWGYFDFNRFHCHFSPRDWQRLINNNWGFRPKRLNFKLFNIQVKEVTQNDGTTTIANNLTSTVQVFTDSEYQLPYVLGSAHQGCLPPFPADVFMVPQYGYLTLNNGSQAVGRSSFYCLEYFPSQMLRTGNNFTFSYTFEDVPFHSSYAHSQSLDRLMNPLIDQYLYYLSRTNTPSGTTTQSRLQFSQAGASDIRDQSRNWLPGPCYRQQRVSKTSADNNNSEYSWTGATKYHLNGRDSLVNPGPAMASHKDDEEKFFPQSGVLIFGKQGSEKTNVDIEKVMITDEEEIRTTNPVATEQYGSVSTNLQRGNRQAATADVNTQGVLPGMVWQDRDVYLQGPIWAKIPHTDGHFHPSPLMGGFGLKHPPPQILIKNTPVPANPSTTFSAAKFASFITQYSTGQVSVEIEWELQKENSKRWNPEIQYTSNYNKSVNVDFTVDTNGVYSEPRPIGTRYLTRNL

SEQ ID NO: 4080 - protein, 735 aa, Artificial Sequence
  Description of Artificial Sequence: Synthetic polypeptide
MAADGYLPDWLEDTLSEGIRQWWKLKPGPPPPKPAERHRDDSRGLVLPGYKYLGPFNGLDKGEPVNEADAAALEHDKAYDRQLDSGDNPYLKYNHADAEFQERLKEDTSFGGNLGRAVFQAKKRVLEPLGLVGEPVKTAPGKKRPVEHSPVEPDSSSGTGKAGQQPARKRLNFGQTGDADSVPDPQPLGQPPAAPSGLGTNTMATGSGAPMADNNEGADGVGNSSGNWHCDSTWMGDRVITTSTRTWALPTYNNHLYKQISSQSGASNGNHYFGYSTPWGYFDFNRFHCHFSPRDWQRLINNNWGFRPKRLNFKLFNIQVKEVTQNDGTTTIANNLTSTVQVFTDSEYQLPYVLGSAHQGCLPPFPADVFMVPQYGYLTLNNGSQAVGRSSFYCLEYFPSQMLRTGNNFTFSYTFEDVPFHSSYAHSQSLDRLMNPLIDQYLYYLSRTNTPSGTTTQSRLQFSQAGASDIRDQSRNWLPGPCYRQQRVSKTSADNNNSEYSWTGATKYHLNGRDSLVNPGPAMASHKDDEEKFFPQSGVLIFGKQGSEKTNVDIEKVMITDEEEIRTTNPVATEQYGSVSTNLQRGNRQAATADVNTQGVLPGMVWQDRDVYLQGPIWAKIPHTDGHFHPSPLMGGFGLKHPPPQILIKNTPVPANPSTTFSAAKFASFITQYSTGQVSVEIEWELQKENSKRWNPEIQYTSNYNKSVNVDFTVDTNGVYSEPRPIGTRYLTRNL

SEQ ID NO: 4081 - protein, 735 aa, Artificial Sequence
  Description of Artificial Sequence: Synthetic polypeptide
MAADGYLPDWLEDTLSEGIRQWWKLKPGPPPPKPAERHRDDSRGLVLPGYKYLGPFNGLDKGEPVNEADAAALEHDKAYDRQLDSGDNPYLKYNHADAEFQERLKEDTSFGGNLGRAVFQAKKRVLEPLGLVEEPVKTAPGKKRPVEHSPVEPDSSSGTGKAGQQPARKRLNFGQTGDADSVPDPQPLGQPPAAPSGLGTNTMATGSGAPMADNNEGADGVGNSSGNWHYDSAWMGDRVITTSTRTWALPTYNNHLYKQISSQSGASNGNHYFGYSTPWGYFDFNRFHCHFSPRDWQRLINNNWGFRPKRLNFKLFNIQVKEVTQNDGTTTIANNLTSTVQVFTDSEYQLPYVLGSAHQGCLPPFPADVFMVPQYGYLTLNNGSQAVGRSSFYCLEYFPSQMLRTGNNFTFSYTFEDVPFHSSYAHSQSLDRLMNPLIDQYLYYLSRTNTPSGTTTQSRLQFSQAGASDIRDQSRNWLPGPCYRQQRVSKTSADNNNSEYSWTGATKYHLNGRDSLVNPGPAMASHKDDEEKFFPQSGVLIFGKQGSEKTNVDIEKVMITDEEEIRTTNPVATEQYGSVSTNLQRGNRQAATADVNTQGVLPGMVWQDRDVYLQGPIWAKIPHTDGHFHPSPLMGGFGLKHPPPQILIKNTPVPANPSTTFSAAKFASFITQYSTGQVSVEIEWELQKENSKRWNPEIQYTSNYNKSVNVDFTVDTNGVYSEPRPIGTRYLTRNL

SEQ ID NO: 4082 - protein, 735 aa, Artificial Sequence
  Description of Artificial Sequence: Synthetic polypeptide
MAADGYLPDWLEDTLSEGIRQWWKLKPGPPPPKPAERHRDDSRGLVLPGYKYLGPFNGLDKGEPVNEADAAALEHDKAYDRQLDSGDNPYLKYNHADAEFQERLKEDTSFGGNLGRAVFQAKKRVLEPLGLVEEPVKTAPGKKRPVEHSPVEPDSSSGTGKAGQQPARKRLNFGQTGDADSVPDPQPLGQPPAAPSGLGTNTMATGSGAPMADNNEGADGVGNSSGNWHCDSTWMGDRVITTSTRTWALPTYNNHLYKQISSQSGASNGNHYFGYSTPWGYFDFNRFHCHFSPRDWQRLINNNWGFRPKRLNFKLFNIQVKEVTQNDGTTTIANNLTSTVQVFTDSEYQLPYVLGSAHQGCLPPFPADVFMVPQYGYLTLNNGSQAVGRSSFYCLEYFPSQMLRTGNNFTFSYTFEDVPFHSSYAHSQSLDRLMNPLIDQYLYYLSRTNTPSGTTTQSRLQFSQAGASDIRDQSRNWLPGPCYRQQRVSKTSADNNNSEYSWTGATKYHLNGRDSLVNPGPAMASHKDDEEKFFPQSGVLIFGKQGSEKTNVDIEKVMITDEEEIRTTNPVATEQYGSVSTNLQRGNRQAATADVNTQGVLPGMVWQDRDVYLQGPIWAKIPHTDGHFHPSPLMGGFGLKHPPPQILIKNTPVPANPSTTFSAAKFASFIAQYSTGQVSVEIEWELQKENSKRWNPEIQYTSNYNKSVNVDFTVDTNGVYSEPRPIGTRYLTRNL

SEQ ID NO: 4083 - protein, 735 aa, Artificial Sequence
  Description of Artificial Sequence: Synthetic polypeptide
MAADGYLPDWLEDTLSEGIRQWWKLKPGPPPPKPAERHRDDSRGLVLPGYKYLGPFNGLDKGEPVNEADAAALEHDKAYDRQLDSGDNPYLKYNHADAEFQERLKEDTSFGGNLGRAVFQAKKRVLEPLGLVEEPVKTAPGKKRPVEHSPVEPDSSSGTGKAGQQPARKRLNFGQTGDADSVPDPQPLGQPPAAPSGLGTNTMATGSGAPMADNNEGADGVGNSSGNWHCDSTWMGDRVITTSTRTWALPTYNNHLYKQISSQSGASNGNHYFGYSTPWGYFDFNRFHCHFSPRDWQRLINNNWGFRPKRLNFKLFNIQVKEVTQNDGTTTIANNLTSTVQVFTDSEYQLPYVLGSAHQGCLPPFPADVFMVPQYGYLTLNNGSQAVGRSSFYCLEYFPSQMLRTGNNFTFSYTFEDVPFHSSYAHSQSLDRLMNPLIDQYPYYLSRTNTPSGTTTQSRLQFSQAGASDIRDQSRNWLPGPCYRQQRVSKTSADNNNSEYSWTGATKYHLNGRDSLVNPGPAMASHKDDEEKFFPQSGVLIFGKQGSEKTNVDIEKVMITDEEEIRTTNPVATEQYGSVSTNLQRGNRQAATADVNTQGVLPGMVWQDRDVYLQGPIWAKIPHTDGHFHPSPLMGGFGLKHPPPQILIKNTPVPANPSTTFSAAKFASFITQYSTGQVSVEIEWELQKENSKRWNPEIQYTSNYNKSVNVDFTVDTNGVYSEPRPIGTRYLTRNL

SEQ ID NO: 4084 - protein, 735 aa, Artificial Sequence
  Description of Artificial Sequence: Synthetic polypeptide
MAADGYLPDWLEDTLSEGIRQWWKLKPGPPPPKPAERHRDDSRGLVLPGYKYLGPFNGLDKGEPVNEADAAALEHDKAYDRQLDSGDNPYLKYNHADAEFQERLKEDTSFGGNLGRAVFQAKKRVLEPLGLVEEPVKTAPGKKRPVEHSPVEPDSSSGTGKAGQQPARKRLNFGQTGDADSVPDPQPLGQPPAAPSGLGTNTMATGSGAPMADNNEGADGVGNSSGNWHCDSTWMGDRVITTSTRTWALPTYNNHLYKQISSQSGASNGNHYFGYSTPWGYFDFNRFHCHFSPRDRQRLINNNWGFRPKRLNFKLFNIQVKEVTQNDGTTTIANNLTSTVQVFTDSEYQLPYVLGSAHQGCLPPFPADVFMVPQYGYLTLNNGSQAVGRSSFYCLEYFPSQMLRTGNNFTFSYTFEDVPFHSSYAHSQSLDRLMNPLIDQYLYYLSRTNTPSGTTTQSRLQFSQAGASDIRDQSRNWLPGPCYRQQRVSKTSADNNNSEYSWTGATKYHLNGRDSLVNPGPAMASHKDDEEKFFPQSGVLIFGKQGSEKTNVDIEKVMITDEEEIRTTNPVATEQYGSVSTNLQRGNRQAATADVNTQGVLPGMVWQDRDVYLQGPIWAKIPHTDGHFHPSPLMGGFGLKHPPPQILIKNTPVPANPSTTFSAAKFASFITQYSTGQVSVEIEWELQKENSKRWNPEIQYTSNYNKSVNVDFTVDTNGVYSEPRPIGTRYLTRNL

SEQ ID NO: 4085 - protein, 735 aa, Artificial Sequence
  Description of Artificial Sequence: Synthetic polypeptide
MAADGYLPDWLEDTLSEGIRQWWKLKPGPPPPKPAERHRDDSRGLVLPGYKYLGPFNGLDKGEPVNEADAAALEHDKAYDRQLDSGDNPYLKYNHADAEFQERLKEDTSFGGNLGRAVFQAKKRVLEPLGLVEEPVKTAPGKKRPVEHSPVEPDSSSGTGKAGQQPARKRLNFGQTGDADSVPDPQPLGQPPAAPSGLGTNTMATGSGAPMADNNEGADGVGNSSGNWHCDSTWMGDRVITTSTRTWALPTYNNHLYKQISSQSGASNGNHYFGYSTPWGYFDFNRFHCHFSPRDWQRLINNNWGFRPKRLNFKLFNIQVKEVTQNDGTTTIANNLTSTVQVFTDSEYQLPYVLGSAHQGCLPPFPADVFMVPQYGYLTLNNGSQAVGRSSFYCLEYFPSQMLRTGNNFTFSYTFEDVPFHSSYAHSQSLDRLMNPLIDQYLYYLSRTNTPSGTTTQSRLQFSQAGASDIRDQSRNWLPGPCYRQQRVSKTSADNNNSEYSWTGATKYHLNGRDSLVNPGPAMASHKDDEEKFFPQSGVLIFGKQGSEKTNVDIEKVMITDEEEIRTTNPVATEQYGSVSTNLQRGNRQAATADVNTQGVLPGMVWQDRDVYLQGPIWAKIPHTDGHFHPSPLMGGFGLKHPPPQILIKNTPVPANPSTTFSAAKFASFITQYSTGQVSVEIEWELQKENSKRWNPEIQYTSNYNKSVNVDLTVDTNGVYSEPRPIGTRYLTRNL

SEQ ID NO: 4086 - protein, 735 aa, Artificial Sequence
  Description of Artificial Sequence: Synthetic polypeptide
MAADGYLPDWLEDTLSEGIRQWWKLKPGPPPPKPAERHRDDSRGLALPGYKYLGPFNGLDKGEPVNEADAAALEHDKAYDRQLDSGDNPYLKYNHADAEFQERLKEDTSFGGNLGRAVFQAKKRVLEPLGLVEEPVKTAPGKKRPVEHSPVEPDSSSGTGKAGQQPARKRLNFGQTGDADSVPDPQPLGQPPAAPSGLGTNTMATGSGAPMADNNEGADGVGNSSGNWHCDSTWMGDRVITTSTRTWALPTYNNHLYKQISSQSGASNGNHYFGYSTPWGYFDFNRFHCHFSPRDWQRLINNNWGFRPKRLNFKLFNIQVKEVTQNDGTTTIANNLTSTVQVFTDSEYQLPYVLGSAHQGCLPPFPADVFMVPQYGYLTLNNGSQAVGRSSFYCLEYFPSQMLRTGNNFTFSYTFEDVPFHSSYAHSQSLDRLMNPLIDQYLYYLSRTNTPSGTTTQSRLQFSQAGASDIRDQSRNWLPGPCYRQQRVSKTSADNNNSEYSWTGATKYHLNGRDSLVNPGPAMASHKDDEEKFFPQSGVLIFGKQGSEKTNVDIEKVMITDEEEIRTTNPVATEQYGSVSTNLQRGNRQAATADVNTQGVLPGMVWQDRDVYLQGPIWAKIPHTDGHFHPSPLMGGFGLKHPPPQILIKNTPVPANPSTTFSAAKFASFITQYSTGQVSVEIEWELQKENSKRWNPEIQYTSNYNKSVNVDFTVDTNGVYSEPRPIGTRYLTRNL

SEQ ID NO: 4087 - protein, 735 aa, Artificial Sequence
  Description of Artificial Sequence: Synthetic polypeptide
MAADGYLPDWLEDTLSEGIRQWWKLKPGPPPPKPAERHRDDSRGLVLPGYKYLGPFNGLDKGEPVNEADAAALEHDKAYDRQLDSGDNPYLKYNHADAEFQERLKEDTSFGGNLGRAVFQAKKRVLEPLGLVEEPVKTAPGKKRPVEHSPVEPDSSSGTGKAGQQPARKRLNFGQTGDADSVPDPQPLGQPPAAPSGLGTNTMATGSGAPMADNNEGADGVGNSSGNWHCDSTWMGDRVITTSTRTWALPTYNNHLYKQISSQSGASNGNHYFGYSTPWGYFDFNRFHCHFSPRDWQRLINNNWGFRPKRLNFKLFNIQVKEVTQNDGTTTIANNLTSTVQVFTDSEYQLPYVLGSAHQGCLPPFPADVFMVPQYGYLTLNNGSQAVGRSSFYCLEYFPSQMLRTGNNFTFSYTFEDVPFHSSYAHSQSLDRLMNPLIDQYLYYLSRTNTPSGTTTQSRLQFSQAGASDIRDQSRNWLPGPCYRQQRVSKTSADNNNSEYSWTGATKYHLNGRDSLVNPGPAMASHKDDEEKFFPQSGVLIFGKQGSEKTNVDIEKVMITDEEEIRTTNPVATEQYGSVSTNLQRGNRQAATADANTQGVLPGMVWQDRDVYLQGPIWAKIPHTDGHFHPSPLMGGFGLKHPPPQILIKNTPVPANPSTTFSAAKFASFITQYSTGQVSVEIEWELQKENSKRWNPEIQYTSNYNKSVNVDFTVDTNGVYSEPRPIGTRYLTRNL

SEQ ID NO: 4088 - protein, 735 aa, Artificial Sequence
  Description of Artificial Sequence: Synthetic polypeptide
MAADGYLPDWLEDTLSEGIRQWWKLKPGPPPPKPAERHRDDSRGLVLPGYKYLGPFNGLDKGEPVNEADAAALEHDKAYDRQLDSGDNPYLKYNHADAEFQERLKEDTSFGGNLGRAVFQAKKRVLEPLGLVEEPVKTAPGKKRPVEHSPVEPDSSSGTGKAGQQPARKRLNFGQTGDADSVPDPQPLGQPPAAPSGLGTNTMATGSGAPMADNNEGADGVGNSSGNWHCDSTWMGDRVITTSTRTWALPTYNNHLYKQISSQSGASNGNHYFGYSTPWGYFDFNRFHCHFSPRDWQRLINNNWGFRPKRLNFKLFNIQVKEVTQNDGTTTIANNLTSTVQVFTDSEYQLPYVLGSAHQGCLPPFPADVFMVPQYGYLTLNNGSQAVGRSSFYCLEYFPSQMLRTGNNFTFSYTFEDVPFHSSYAHSQSLDRLMNPLIDQYLYYLSRTNTPSGTTTQSRLQFSQAGASDIRDQSRNWLPGPCYRQQRVSKTSADNNNSEYSWTGATKYHLNGRDSLVNPGPAMASHKDDEEKFFPQSGVLIFGKQGSEKTNVDIEKVMITDEGEIRTTNPVATEQYGSVSTNLQRGNRQAATADVNTQGVLPGMVWQDRDVYLQGPIWAKIPHTDGHFHPSPLMGGFGLKHPPPQILIKNTPVPANPSTTFSAAKFASFITQYSTGQVSVEIEWELQKENSKRWNPEIQYTSNYNKSVNVDFTVDTNGVYSEPRPIGTRYLTRNL

SEQ ID NO: 4089 - protein, 735 aa, Artificial Sequence
  Description of Artificial Sequence: Synthetic polypeptide
MAADGYLPDWLEDTLSEGIRQWWKLKPGPPPPKPAERHRDDSRGLVLPGYKYLGPFNGLDKGEPVNEADAAALEHDKAYDRQLDSGDNPYLKYNHADAEFQERLKEDTSFGGNLGRAVFQAKKRVLEPLGLVEEPVKTAPGKKRPVEHSPVEPDSSSGTGKAGQQPARKRLNFGQTGDADSVPDPQPLGQPPAAPSGLGTNTMATGSGAPMADNNEGADGVGNSSGNWHCDSTWMGDRVITTSTRTWALPTYNNHLYKQISSQSGASNGNHYFGYSTPWGYFDFNRFHCHFSPRDWQRLINNNWGFRPKRLNFKLFNIQVKEVTQNDGTTTIANNLTSTVQVFTDSEYQLPYVLGSAHQGCLPPFPADVFMVPQYGYLTLNNGSQAVGRSSFYCLEYFPSQMLRTGNNFTFSYTFEDVPFHSSYAHSQSLDRLMNPLIDQYLYYLSRTNTPSGTTTQSRLQFSQAGASDIRDQSRNWLPGPCYRQQRVSKTSADNNNSEYSWTGATKYHLNGRDSLVNPGPAMASHKDDEEKFFPQSGVLIFGKQGSEKTNVDIEKVMITDEEEIRTTNPVATEQYGSVSTNLQRGNRQAATADVNTQGVLPGMVWQDRDVYLQGPIWAKIPHTDGHFHPSPPMGGFGLKHPPPQILIKNTPVPANPSTTFSAAKFASFITQYSTGQVSVEIEWELQKENSKRWNPEIQYTSNYNKSVNVDFTVDTNGVYSEPRPIGTRYLTRNL

SEQ ID NO: 4090 - protein, 735 aa, Artificial Sequence
  Description of Artificial Sequence: Synthetic polypeptide
MAADGYLPDWLEDTLSEGIRQWWKLKPGPPPPKPAERHRDDSRGLVLPGYKYLGPFNGLDKGEPVNEADAAALEHDKAYDRQLDSGDNPYLKYNHADAEFQERLKEDTSFGGNLGRAVFQAKKRVLEPLGLVEEPVKTAPGKKRPVEHSPVEPDSSSGTGKAGQQPARKRLNFGQTGDADSVPDPQPLGQPPAAPSGLGTNTMATGSGAPMADNNEGADGVGNSSGNWHCDSTWMGDRVITTSTRTWALPTYNNHLYKQISSQSGASNGNHYFGYSTPWGYFDFNRFHCHFSPRDWQRLINNNWGFRPKRLNFKLFNIQVKEVTQNDGTTTIANNLTSTVQVFTDSEYQLPYVLGSAHQGCLPPFPADVFMVPQYGYLTLNNGSQAVGRSSFYCLEYFPSQMLRTGNNFTFSYTFEDVPFHSSYAHSQSLDRLMNPLIDQYLYYLSRTNTPSGTTTQSRLQFSQAGASDIRDQSRNWLPGPCYRQQRVSKTSADNNNSEYSWTGATKYHLNGRDSLVNPGPAMASHKDDEEKFFPQSGVLIFGKQGSEKTNVDIEKVMITDEEEIRTTNPVATEQYGSVSTNLQRGNRQAATADVNTQGVLPGMVWQDRDVYLQGPIWAKIPHTDGHFHPSPLMGGFGLKHPPPQILIKNTPVPANPSTTFSAAKFASFITQYSTGQVSVEIEWELQKENSKRWNPEIQYTSDYNKSVNVDFTVDTNGVYSEPRPIGTRYLTRNL

SEQ ID NO: 4091 - protein, 735 aa, Artificial Sequence
  Description of Artificial Sequence: Synthetic polypeptide
MAADGYLPDWLEDTLSEGIRQWWKLKPGPPPPKPAERHRDDSRGLVLPGYKYLGPFNGLDKGEPVNEADAAALEHDKAYDRQLDSGDNPYLKYNHADAEFQERLKEDTSFGGNLGRAVFQAKKRVLEPLGLVEEPVKTAPGKKRPVEHSPVEPDSSSGTGKAGQQPARKRLNFGQTGDADSVPDPQPLGQPPAAPSGLGTNTMATGSGAPMADNNEGADGVGNSSGNWHCDSTWMGDRVITTSTRTWALPTYNNHLYKQISSQSGASNGNHYFGYSTPWGYFDFNRFHCHFSPRDWQRLINNNWGFRPKRLNFKLFNIQVKEVTQNGGTTTIANNLTSTVQVFTDSEYQLPYVLGSAHQGCLPPFPADVFMVPQYGYLTLNNGSQAVGRSSFYCLEYFPSQMLRTGNNFTFSYTFEDVPFHSSYAHSQSLDRLMNPLIDQYLYYLSRTNTPSGTTTQSRLQFSQAGASDIRDQSRNWLPGPCYRQQRVSKTSADNNNSEYSWTGATKYHLNGRDSLVNPGPAMASHKDDEEKFFPQSGVLIFGKQGSEKTNVDIEKVMITDEEEIRTTNPVATEQYGSVSTNLQRGNRQAATADVNTQGVLPGMVWQDRDVYLQGPIWAKIPHTDGHFHPSPLMGGFGLKHPPPQILIKNTPVPANPSTTFSAAKFASFITQYSTGQVSVEIEWELQKENSKRWNPEIQYTSNYNKSVNVDFTVDTNGVYSEPRPIGTRYLTRNL

SEQ ID NO: 4092 - protein, 735 aa, Artificial Sequence
  Description of Artificial Sequence: Synthetic polypeptide
MAADGYLPDWLEDTLSEGIRQWWKLKPGPPPPKPAERHRDDSRGLVLPGYKYLGPFNGLDKGEPVNEADAAALEHDKAYDRQLDSGDNPYLKYNHADAEFQERLKEDTSFGGNLGRAVFQAKKRVLEPLGLVEEPVKTAPGKKRPVEHSPVEPDSSSGTGKAGQQPARKRLNFGQTGDADSVPDPQPLGQPPAAPSGLGTNTMATGSGAPMADNNEGADGVGNSSGNWHCDSTWMGDRVITTSTRTWALPTYNNHLYKQISSQSGASNGNHYFGYSTPWGYFDFNRFHCHFSPRDWQRLINNNWGFRPKRLNFKLFNIQVKEVTQNDGTTTIANNLTSTVQVFTDSEYQLPYVLGSAHQGCLPPFPADVFMVPQYGYLTLNNGSQAVGRSSFYCLEYFPSQMLRTGNNFTFSYTFEDVPFHSSYAHSQSLDRLMNPLIDQYLYYLSRTNTPSGTTTQSRLQFSQAVASDVRDQSRNWLPGPCYRQQRVSKTSADNNNSEYSWTGATKYHLNGRDSLVNPGPAMASHKDDEEKFFPQSGVLIFGKQGSEKTNVDIEKVMITDEEEIRTTNPVATEQYGSVSTNLQRGNRQAATADVNTQGVLPGMVWQDRDVYLQGPIWAKIPHTDGHFHPSPLMGGFGLKHPPPQILIKNTPVPANPSTTFSAAKFASFITQYSTGQVSVEIEWELQKENSKRWNPEIQYTSNYNKSVNVDFTVDTNGVYSEPRPIGTRYLTRNL

SEQ ID NO: 4093 - protein, 735 aa, Artificial Sequence
  Description of Artificial Sequence: Synthetic polypeptide
MAADGYLPDWLEDTLSEGIRQRWKLKPGPPPPKPAERHRDDSRGLVLPGYKYLGPFNGLDKGEPVNEADAAALEHDKAYDRQLDSGDNPYLKYNHADAEFQERLKEDTSFGGNLGRAVFQAKKRVLEPLGLVEEPVKTAPGKKRPVEHSPVEPDSSSGTGKAGQQPARKRLNFGQTGDADSVPDPQPLGQPPAAPSGLGTNTMATGSGAPMADNNEGADGVGNSSGNWHCDSTWMGDRVITTSTRTWALPTYNNHLYKQISSQSGASNGNHYFGYSTPWGYFDFNRFHCHFSPRDWQRLINNNWGFRPKRLNFKLFNIQVKEVTQNDGTTTIANNLTSTVQVFTDSEYQLPYVLGSAHQGCLPPFPADVFMVPQYGYLTLNNGSQAVGRSSFYCLEYFPSQMLRTGNNFTFSYTFEDVPFHSSYAHSQSLDRLMNPLIDQYLYYLSRTNTPSGTTTQSRLQFSQAGASDIRDQSRNWLPGPCYRQQRVSKTSADNNNSEYSWTGATKYHLNGRDSLVNPGPAMASHKDDEEKFFPQSGVLIFGKQGSEKTNVDIEKVMITDEEEIRTTNPVATEQYGSVSTNLQRGNRQAATADVNTQGVLPGMVWQDRDVYLQGPIWAKIPHTDGHFHPSPLMGGFGLKHPPPQILIKNTPVPANPSTTFSAAKFASFITQYSTGQVSVEIEWELQKENSKRWNPEIQYTSNYNKSVNVDFTVDTNGVYSEPRPIGTRYLTRNL

SEQ ID NO: 4094 - protein, 735 aa, Artificial Sequence
  Description of Artificial Sequence: Synthetic polypeptide
MAADGYLPDWLEDTLSEGIRQWWKLKPGPPPPKPAERHKDDSRGLVLPGYKYLGPFNGLDKGEPVNEADAAALEHDKAYDRQLDSGDNPYLKYNHADAEFQERLKEDTSFGGNLGRAVFQAKKRVLEPLGLVEEPVKTAPGKKRPVEHSPVEPDSSSGTGKAGQQPARKRLNFGQTGDADSVPDPQPLGQPPAAPSGLGTNTMATGSGAPMADNNEGADGVGNSSGNWHCDSTWMGDRVITTSTRTWALPTYNNHLYKQISSQSGASNDNHYFGYSTPWGYFDFNRFHCHFSPRDWQRLINNNWGFRPKRLNFKLFNIQVKEVTQNDGTTTIANNLTSTVQVFTDSEYQLPYVLGSAHQGCLPPFPADVFMVPQYGYLTLNNGSQAVGRSSFYCLEYFPSQMLRTGNNFTFSYTFEDVPFHSSYAHSQSLDRLMNPLIDQYLYYLSRTNTPSGTTTQSRLQFSQAGASDIRDQSRNWLPGPCYRQQRVSKTSADNNNSEYSWTGATKYHLNGRDSLVNPGPAMASHKDDEEKFFPQSGVLIFGKQGSEKTNVDIEKVMTTDEEEIRTTNPVATEQYGSVSTNLQRGNRQAATADVNTQGVLPGMVWQDRDVYLQGPIWAKIPHTDGHFHPSPLMGGFGLKHPPPQILIKNTPVPANPSTTFSAAKFASFITQYSTGQVSVEIEWELQKENSKRWNPEIQYTSNYNKSVNVDFTVDTNGVYSEPRPIGTRYLTRNL

SEQ ID NO: 4095 - protein, 735 aa, Artificial Sequence
  Description of Artificial Sequence: Synthetic polypeptide
MAADGYLPDWLEDTLSEGIRQWWKLKPGPPPPKPAERHKDDSRGLVLPGYKYLGPFNGLDKGEPVNEADAAALEHDKAYDRQLDSGDNPYLKYNHADAEFQERLKEDTSFGGNLGRAVFQAKKRVLEPPGLVEEPVKTAPGKKRPVEHSPVEPDSSSGTGKAGQQPARKRLNFGQTGDADSVPDPQPLGQPPAAPSGLGTNTMATGSGAPMADNNEGADGVGNSSGNWHCDSTWMGDRVITTSTRTWALPTYNNHLYKQISSQSGASNDNHYFGYSTPWGYFDFNRFHCHFSPRDWQRLINNNWGFRPKRLNFKLFNIQVKEVTQNDGTTTIANNLTSTVQVFTDSEYQLPYVLGSAHQGCLPPFPADVFMVPQYGYLTLNNGSQAVGRSSFYCLEYFPSQMLRTGNNFTFSYTFEDVPFHSSYAHSQSLDRLMNPLIDQYLYYLSRTNTPSGTTTQSRLQFSQAGASDIRDQSRNWLPGPCYRQQRVSKTSADNNNSEYSWTGATKYHLNGRDSLVNPGPAMASHKDDEEKFFPQSGVLIFGKQGSEKTNVDIEKVMTTDEEEIRTTNPVATEQYGSVSTNLQRGNRQAATADVNTQGVLPGMVWQDRDVYLQGPIWAKIPHTDGHFHPSPLMGGFGLKHPPPQILIKNTPVPANPSTTFSAAKFASFITQYSTGQVSVEIEWELQKENSKRWNPEIQYTSNYNKSVNVDFTVDTNGVYSEPRPIGTRYLTRNL

SEQ ID NO: 4096 - protein, 735 aa, Artificial Sequence
  Description of Artificial Sequence: Synthetic polypeptide
MAADGYLPDWLEDTLSEGIRQWWKLKPGPPPPKPAERHKDDSRGLVLPGYKYLGPFNGLDKGEPVNEADAAALEHDKAYDRQLDSGDNPYLKYNHADAEFQERLKEDTSFGGNLGRAVFQAKKRVLEPLGLVEEPVKTAPGKKRPVEHSPVEPDSSSGTGKAGQQPARKRLNFGQTGDADSVPDPQPLGQPPAAPSGLGTNTMATGSGAPMADNNEGADGVGNSSGNWHCDSTWMGDRVITTSTRTWALPTYNNHLYKQISSQSGASNDNHYFGYSTPWGYFDFNRFHCHFSPRDWQRLINNNWGFRPKRLNFKLFNIQVKEVTQNDGTTTIANNLTSTVQVFTDSEYQLPYVLGSAHQGCLPPFPADVFMVPQYGYLTLNNGSQAVGRSSFYCLEYFPSQMLRTGNNFTFSYTFEDVPFHSSYAHSQSLDRLMNPLIDQYLYYLSRTNTPSGTTTQSRLQFSQAGASDIRDQSRNWLPGPCYRQQRVSKTSADNNNSEYSWTGATKYHLNGRDSLVNPGPAMASHKDDEEKFFPQSGVLIFGKQGSEKTNVDIEKVMTTDEEEIRTTNPVATEQYGSVSTNLQRGNRQAATADVNTQGVLPGMVWQDRDVYLQGPIWAKIPHTDGHFHPSPLMGGFGLKHPPPQILIKNTPVPANPSTTFSAAKFASFITQYSTGQVSVEIEWELQKENGKRWNPEIQYTSNYNKSVNVDFTVDTNGVYSEPRPIGTRYLTRNL

SEQ ID NO: 4097 - protein, 735 aa, Artificial Sequence
  Description of Artificial Sequence: Synthetic polypeptide
MAADGYLPDWLEDTLSEGIRQWWKLKPGPPPPEPAERHKDDSRGLVLPGYKYLGPFNGLDKGEPVNEADAAALEHDKAYDRQLDSGDNPYLKYNHADAEFQERLKEDTSFGGNLGRAVFQAKKRVLEPLGLVEEPVKTAPGKKRPVEHSPVEPDSSSGTGKAGQQPARKRLNFGQTGDADSVPDPQPLGQPPAAPTSLGSTTMATGSGAPMADNNEGADGVGNSSGNWHCDSQWLGDRVITTSTRTWALPTYNNHLYKQISSQSGASNDNHYFGHSTPWGYFDFNRFHCHFSPRDWQRLINNNWGFRPKRLNFKLFNIQVKEVTQNDGTTTIANNLTSTVQVFTDSEYQLPYVLGSAHQGCLPPFPADVFMVPQYGYLTLNNGSQAVGRSSFYCLEYFPSQMLRTGNNFTFSYTFEDVPFHSSYAHSQSLDRLMNPLIDQYLYYLNKTQSNSGTLQQSRLLFSQAGPTSMSLQAKNWLPGPCYRQQRLSKQANDNNNSNFPWTAATKYHLNGRDSLVNPGPAMASHKDDEEKFFPMHGTLIFGKQGTNANDADLDNVMITDEEEIRTTNPVATEQYGTVSNNLQNSNTGPTTGTVNHQGALPGMVWQDRDVYLQGPIWAKIPHTDGHFHPSPLMGGFGLKHPPPQIMIKNTPVPANPPTNFSSAKFASFITQYSTGQVSVEIEWELQKENSKRWNPEIQYTSNYNKSVNVDFTVDTNGVYSEPRPIGTRYLTRNL

SEQ ID NO: 4098 - protein, 735 aa, Artificial Sequence
  Description of Artificial Sequence: Synthetic polypeptide
MAADGYLPDWLEDTLSEGIRQWWKLKPGPPPPKPAERHKDDSRGLVLPGYKYLGPFNGLDKGEPVNEADAAALEHDKAYDRQLDSGDNPYLKYNHADAEFQERLKEDTSFGGNLGRAVFQAKKRVLEPLGLVEEPVKTAPGKKRPVEHSPVEPDSSSGTGKAGQQPARKRLNFGQTGDADSVPDPQPLGQPPAAPTSLGSTTMATGSGAPMADNNEGADGVGNSSGNWHCDSQWLGDRVITTSTRTWALPTYNNHLYKQISSQSGASNDNHYFGHSTPWGYFDFNRFHCHFSPRDWQRLINNNWGFRPKRLNFKLFNIQVKEVTQNDGTTTIANNLTSTVQVFTDSEYQLPYVLGSAHQGCLPPFPADVFMVSQYGYLTLNNGSQAVGRSSFYCLEYFPSQMLRTGNNFTFSYTFEDVPFHSSYAHSQSLDRLMNPLIDQYLYYLNKTQSNSGTLQQSRLLFSQAGPTSMSLQAKNWLPGPCYRQQRLSKQANDNNNSNFPWTAATKYHLNGRDSLVNPGPAMASHKDDEEKFFPMHGTLIFGKQGTNANDADLDNVMITDEEEIRTTNPVATEQYGTVSNNLQNSNTGPTTGTVNHQGALPGMVWQDRDVYLQGPIWAKIPHTDGHFHPSPLMGGFGLKHPPPQIMIKNTPVPANPPTNFSSAKFASFITQYSTGQVSVEIEWELQKENSKRWNPEIQYTSNYNKSVNVDFTVDTNGVYSEPRPIGTRYLTRNL

SEQ ID NO: 4099 - protein, 735 aa, Artificial Sequence
  Description of Artificial Sequence: Synthetic polypeptide
MAADGYLPDWLEDTLSEGIRQWWKLKPGPPPPKPAERHKDDSRGLVLPGYKYLGPFNGLDKGEPVNEADAAALEHDKAYDRQLDSGDNPYLKYNHADAEFQERLKEDTSFGGNLGRAVFQAKKRVLEPLGLVEEPVKTAPGKKRPVEHSPVEPDSSSGTGKAGQQPARKRLNFGQTGDADSVPDPQPLGQPPAAPTSLGSTTMATGSGAPMADNNEGADGVGNSSGNWHCDSQWLGDRVITTSTRTWALPTYNNHLYKQISSQSGASNDNHYFGHSTPWGYFDFNRFHCHFSPRDWQRLINNNWGFRPKRLNFKLFNIQVKEVTQNDGTTTIANNLTSTVQVFTDSEYQLPYVLGSAHQGCLPPFPADVFMVSQYGYLTLNNGSQAVGRSSFYCLEYFPSQMLRTGNNFTFSYTFEDVPFHSSYAHSQSLDRLMNPLIDQYLYYLNKTQSNSGTLQQSRLLFSQAGPTSMSLQAKNWLPGPCYRQQRLSKQANDNNNSNFPWTAATKYHLNGRDSLVNPGPAMASHKDDEEKLFPMHGTLIFGKQGTNANDADLDNVMITDEEEIRTTNPVATEQYGTVSNNLQNSNTGPTTGTVNHQGALPGMVWQDRDVYLQGPIWAKIPHTDGHFHPSPLMGGFGLKHPPPQIMIKNTPVPANPPTNFSSAKFASFITQYSTGQVSVEIEWELQKENSKRWNPEIQYTSNYNKSVNVDFTVDTNGVYSEPRPIGTRYLTRNL

SEQ ID NO: 4100 - protein, 735 aa, Artificial Sequence
  Description of Artificial Sequence: Synthetic polypeptide
MAADGYLPDWLEDTLSEGIRQWWKLKPGPPPPKPAERHKDDSRGLVLPGYKYLGPFNGLDKGEPVNEADAAALEHDKAYDRQLDSGDNPYLKYNHADAEFQERLKEDTSFGGNLGRAVFQAKKRVLEPLGLVEEPVKTAPGKKRPVEHSPVEPDSSSGTGKAGQQPARKRLNFGQTGDADSVPDPQPLGQPPAAPTSLGSTTMATGSGAPMADNNEGADGVGNSSGNWHCDSQWLGDRVITTSTRTWALPTYNNHLYKQISSQSGASNDNHYFGHSTPWGYFDFNRFHCHFSPRDWQRLINNNWGFRPKRLNFKLFNIQVKEVTQNDGTTTIANNLTSTVQVFTDSEYQLPYVLGSAHQGCLPPFPADVFMVPQYGYLTLNNGSQAVGRSSFYCLEYFPSQMLRTGNNFTFSYTFEDVPFHSSYAHSQSLDRLMNPLIDQYLYYLNKTQSNSGTLQQSRLLFSQAGPTSMSLQAKNWLPGPCYRQQRLSKQANDNNNSNFSWTAATKYHLNGRDSLVNPGPAMASHKDDEEKFFPMHGTLIFGKQGTNANDADLDNVMITDEEEIRTTNPVATEQYGTVSNNLQNSNTGPTTGTVNHQGALPGMVWQDRDVYLQGPIWAKIPHTDGHFHPSPLMGGFGLKHPPPQIMIKNTPVPANPPTNFSSAKFASFITQYSTGQVSVEIEWELQKENSKRWNPEIQYTSNYNKSVNVDFTVDTNGVYSEPRPIGTRYLTRNL

SEQ ID NO: 4101 - protein, 735 aa, Artificial Sequence
  Description of Artificial Sequence: Synthetic polypeptide
MAADGYLPDWLEDTLSEGIRQWWKLKPGPPPPKPAERHKDDSRGLVLPGYKYLGPFNGLDKGEPVNEADAAALEHDKAYDRQLDSGDNPYLKYNHADAEFQERLKEDTSFGGNLGRAVFQAKKRVLEPLGLVEEPVKTAPGKKRPVEHSPVEPDSSSGTGKAGQQPARKRLNFGQTGDADSVPDPQPLGQPPAAPTSLGSTTMATGSGAPMADNNEGADGVGNSSGNWHCDSQWLGDRVITTSTRTWALPTYNNHLYKQISSQSGASNDNHYFGHSTPWGYFDFNRFHCHFSPRDWQRLINNNWGFRPKRLNFKLFNIQVKEVTQNDGTTTIANNLTSTVQVFTDSEYQLPYVLGSAHQGCLPPFPADVFMVPQYGYLTLNNGSQAVGRSSFYCLEYFPSQMLRTGNNFTFSYTFEDVPFHSSYAHSQSLDRLMNPLIDQYLYYLNKTQSNSGTLQQSRLLFSQAGPTSMSLQAKNWLPGPCYRQQRLSKQANDNNNSNFPWTAATKYHLNGRDSLVNPGPAMASHKDDEEKFFPMHGTLIFGKQGTNANDADLDNVMITDEEEIRTTNPLATEQYGTVSNNLQNSNTGPTTGTVNHQGALPGMVWQDRDVYLQGPIWAKIPHTDGHFHPSPLMGGFGLKHPPPQIMIKNTPVPANPPTNFSSAKFASFITQYSTGQVSVEIEWELQKENSKRWNPEIQYTSNYNKSVNVDFTVDTNGVYSEPRPIGTRYLTRNL

SEQ ID NO: 4102 - protein, 735 aa, Artificial Sequence
  Description of Artificial Sequence: Synthetic polypeptide
MAADGYLPDWLEDTLSEGIRQWWKLKPGPPPPKPAERHKDDSRGLVLPGYKYLGPFNGLDKGEPVNEADAAALEHDKAYDRQLDSGDNPYLKYNHADAEFQERLKEDTSFGGNLGRAVFQAKKRVLEPLGLVEEPVKTAPRKKRPVEHSPVEPDSSSGTGKAGQQPARKRLNFGQTGDADSVPDPQPLGQPPAAPTSLGSTTMATGSGAPMADNNEGADGVGNSSGNWHCDSQWLGDRVITTSTRTWALPTYNNHLYKQISSQSGASNDNHYFGHSTPWGYFDFNRFHCHFSPRDWQRLINNNWGFRPKRLNFKLFNIQVKEVTQNDGTTTIANNLTSTVQVFTDSEYQLPYVLGSAHQGCLPPFPADVFMVPQYGYLTLNNGSQAVGRSSFYCLEYFPSQMLRTGNNFTFSYTFEDVPFHSSYAHSQSLDRLMNPLIDQYLYYLNKTQSNSGTLQQSRLLFSQAGPTSMSLQAKNWLPGPCYRQQRLSKQANDNNNSNFPWTAATKYHLNGRDSLVNPGPAMASHKDDEEKFFPMHGTLIFGKQGTNANDADLDNVMITDEEEIRTTNPVATEQYGTVSNNLQNSNTGPTTGTVNHQGALPGMVWQDRDVYLQGPIWAKIPHTDGHFHPSPLMGGFGLKHPPPQIMIKNTPVPANPPTNFSSAKFASFITQYSTGQVSVEIEWELQKENSKRWNPEIQYTSNYNKSVNVDFTVDTNGVYSEPRPIGTRYLTRNL

SEQ ID NO: 4103 - protein, 735 aa, Artificial Sequence
  Description of Artificial Sequence: Synthetic polypeptide
MAADGYLPDWLEDTLSEGIRQWWKLKPGPPPPKPAERHKDDSRGLVLPGYKYLGPFNGLDKGEPVNEADAAALEHDKAYDRQLDSGDNPYLKYNHADAEFQERLKEDTSFGGNLGRAVFQAKKRVLEPLGLVEEPVKTAPGKKRPVEHSPVEPDSSSGTGKAGQQPARKRLNFGQTGDADSVPDPQPLGQPPAAPTSLGSTTMATGSGAPMADNNEGADGVGNSSGNWHCDSQWLGDRVITTSTRTWALPTYNNHLYKQISSQSGASNDNHYFGHSTPWGYFDFNRFHCHFSPRDWQRLINNNWGFRPKRLNFKLFNIQVKEVTQNDGTTTIANNLTSTVQVFTDSEYQLPYVLGSAHQGCLPPFPADVFMVPQYGYLTLNNGSQAVGRSSFYCLEYFPSQMLRTGNNFTFSYTFEDVPFHSSYAHSQSLDRLMNPLIDQYLYYLNKTQSNSGTLQQSRLLFSQAGPTSMSLQAKNWLPGPCYRQQRLSKQANDNNNSNFPWTAATKYHLNGRDSLVNPGPAMASHKDDEEKFFPMHGTLIFGKQGTNANDADLDNVMITDEEEIRTTNPVATEQYGTVSNNLQNSNTGPTTGTVNHQGALPGMVWQDRDVYLQGPIWAKIPHTDGRFHPSPLMGGFGLKHPPPQIMIKNTPVPANPPTNFSSAKFASFITQYSTGQVSVEIEWELQKENSKRWNPEIQYTSNYNKSVNVDFTVDTNGVYSEPRPIGTRYLTRNL

SEQ ID NO: 4104 - protein, 735 aa, Artificial Sequence
  Description of Artificial Sequence: Synthetic polypeptide
MAADGYLPDWLEDTLSEGIRQWWKLKPGPPPPKPAERHKDDSRGLVLPGYKYLGPFNGLDKGEPVNEADAAALEHDKAYDRQLDSGDNPYLKYNHADAEFQERLKEDTSFGGNLGRAVFQAKKRVLEPLGLVEEPVKTAPGKKRPVEHSPVEPDSSSGTGKAGQQPARKRLNFGQTGDADSVPDPQPLGQPPAAPTSLGSTTMATGSGAPMADNNEGADGVGNSSGNWHCDSQWLGDRVITTSTRTWALPTYSNHLYKQISSQSGASNDNHYFGHSTPWGYFDFNRFHCHFSPRDWQRLINNNWGFRPKRLNFKLFNIQVKEVTQNDGTTTIANNLTSTVQVFTDSEYQLPYVLGSAHQGCLPPLPADVFMVPQYGYLTLNNGSQAVGRSSFYCLEYFPSQMLRTGNNFTFSYTFEDVPFHSSYAHSQSLDRLMNPLIDQYLYYLNKTQSNSGTLQQSRLLFSQAGPTSMSLQAKNWLPGPCYRQQRLSKQANDNNNSNFPWTAATKYHLNGRDSLVNPGPAMASHKDDEEKFFPMHGTLIFGKQGTNANDADLDNVMITDEEEIRTTNPVATEQYGTVSNNLQNSNTGPTTGTVNHQGALPGMVWQDRDVYLQGPIWAKIPHTDGHFHPSPLMGGFGLKHPPPQIMIKNTPVPANPPTNFSSAKFASFITQYSTGQVSVEIEWELQKENSKRWNPEIQYTSNYNKSVNVDFTVDTNGVYSEPRPIGTRYLTRNL

SEQ ID NO: 4105 - protein, 735 aa, Artificial Sequence
  Description of Artificial Sequence: Synthetic polypeptide
MAADGYLPDWLEDTLSEGIRQWWKLKPGPPPPKPAERHKDDSRGLVLPGYKYLGPFNGLDKGEPVNEADAAALEHDKAYDRQLDSGDNPYLKYNHADAEFQERLKEDTSFGGNLGRAVFQAKKRVLEPLGLVEEPVKTAPGKKRPVEHSPVEPDSSSGTGKAGQQPARKRLNFGQTGGADSVPDPQPLGQPPAAPTSLGSTTMATGSGAPMADNNEGADGVGNSSGNWHCDSQWLGDRVITTSTRTWALPTYNNHLYKQISSQSGASNDNHYFGHSTPWGYFDFNRFHCHFSPRDWQRLINNNWGFRPKRLNFKLFNIQVKEVTQNDGTTTIANNLTSTVQVFTDSEYQLPYVLGSAHQGCLPPFPADVFMVPQYGYLTLNNGSQAVGRSSFYCLEYFPSQMLRTGNNFTFSYTFEDVPFHSSYAHSQSLDRLMNPLIDQYLYYLNKTQSNSGTLQQSRLLFSQAGPTSMSLQAKNWLPGPCYRQQRLSKQANDNNNSNFPWTAATKYHLNGRDSLVNPGPAMASHKDDEEKFFPMHGTLIFGKQGTNANDADLDNVMITDEEEIRTTNPVATEQYGTVSNNLQNSNTGPTTGTVNHQGALPGMVWQDRDVYLQGPIWAKIPHTDGHFHPSPLMGGFGLKHPPPQIMIKNTPVPANPPTNFSSAKFASFITQYSTGQVSVEIEWELQKENSKRWNPEIQYTSNYNKSVNVDFTVDTNGVYSEPRPIGTRYLTRNL

SEQ ID NO: 4106 - protein, 735 aa, Artificial Sequence
  Description of Artificial Sequence: Synthetic polypeptide
MAADGYLPDWLEDTLSEGIRQWWKLKPGPPPPKPAERHKDDSRGLVLPGYKYLGPFNGLDKGEPVNEADAAALEHGKAYDRQLDSGDNPYLKYNHADAEFQERLKEDTSFGGNLGRAVFQAKKRVLEPLGLVEEPVKTAPGKKRPVEHSPVEPDSSSGTGKAGQQPARKRLNFGQTGDADSVPDPQPLGQPPAAPTSLGSTTMATGSGAPMADNNEGADGVGNSSGNWHCDSQWLGDRVITTSTRTWALPTYNNHLYKQISSQSGASNDNHYFGHSTPWGYFDFNRFHCHFSPRDWQRLINNNWGFRPKRLNFKLFNIQVKEVTQNDGTTTIANNLTSTVQVFTDSEYQLPYVLGSAHQGCLPPFPADVFMVPQYGYLTLNNGSQAVGRSSFYCLEYFPSQMLRTGNNFTFSYTFEDVPFHSSYAHSQSLDRLMNPLIDQYLYYLNKTQSNSGTLQQSRLLFSQAGPTSMSLQAKNWLPGPCYRQQRLSKQANDNNNSNFPWTAATKYHLNGRDSLVNPGPAMASHKDDEEKFFPMHGTLIFGKQGTNANDADLDNVMITDEEEIRTTNPVATEQYGTVSNNLQNSNTGPTTGTVNHQGALPGMVWQDRDVYLQGPIWAKIPHTDGHFHPSPLMGGFGLKHPPPQIMIKNTPVPANPPTNFSSAKFASFITQYSTGQVSVEIEWELQKENSKRWNPEIQYTSNYNKSVNVDFTVDTNGVYSEPRPIGTRYLTRNL

SEQ ID NO: 4107 - protein, 735 aa, Artificial Sequence
  Description of Artificial Sequence: Synthetic polypeptide
MAADGYLPDWLEDTLSEGIRQWWKLKPGPPPPKPAERHKDDSRGLVLPGYKYLGPFNGLDKGEPVNEADAAALEHDKAYDRQLDSGDNPYLKYNHADAEFQERLKEDTSFGGNLGRAVFQAKKRVLEPLGLVEEPVKTAPGKKRPVEHSPVEPDSSSGTGKAGQQPARKRLNFGQTGDADSVPDPQPLGQPPAAPTSLGSTTMATGSGAPMADNNEGADGVGNSSGNWHCDSQWLGDRVITTSTRTWALPTYNNHLYKQISSQSGASNDNHYFGHSTPWGYFDFNRFHCHFSPRDRQRLINNNWGFRPKRLNFKLFNIQVKEVTQNDGTTTIANNLTSTVQVFTDSEYQLPYVLGSAHQGCLPPFPADVFMVPQYGYLTLNNGSQAVGRSSFYCLEYFPSQMLRTGNNFTFSYTFEDVPFHSSYAHSQSLDRLMNPLIDQYLYYLNKTQSNSGTLQQSRLLFSQAGPTSMSLQAKNWLPGPCYRQQRLSKQANDNNNSNFPWTAATKYHLNGRDSLVNPGPAMASHKDDEEKFFPMHGTLIFGKQGTNANDADLDNVMITDEEEIRTTNPVATEQYGTVSNNLQNSNTGPTTGTVNHQGALPGMVWQDRDVYLQGPIWAKIPHTDGHFHPSPLMGGFGLKHPPPQIMIKNTPVPANPPTNFSSAKFASFITQYSTGQVSVEIEWELQKENSKRWNPEIQYTSNYNKSVNVDFTVDTNGVYSEPRPIGTRYLTRNL

SEQ ID NO: 4108 - protein, 735 aa, Artificial Sequence
  Description of Artificial Sequence: Synthetic polypeptide
MAADGYLPDWLEDTLSEGIRQWWKLKPGPPPPKPAERHKDDSRGLVLPGYKYLGPFNGLDKGEPVNEADAAALEHDKAYDRQLDSGDNPYLKYNHADAEFQERLKEDTSFGGNLGRAVFQAKKRVLEPLGLVEEPVKTAPGKKRPVEHSPVEPDSSSGTGKAGQQPARKRLNFGQTGDADSVPDPQPLGQPPAAPTSLGSTTMATGSGAPMADNNEGADGVGNSSGNWHCDSQWLGDRVITTSTRTWALPTYNNHLYKQISSQSGASNDNHYFGHSTPWGYFDFNRFHCHFSPRDWQRLINNNWGFRPKRPNFKLFNIQVKEVTQNDGTTTIANNLTSTVQVFTDSEYQLPYVLGSAHQGCLPPFPADVFMVPQYGYLTLNNGSQAVGRSSFYCLEYFPSQMLRTGNNFTFSYTFEDVPFHSSYAHSQSLDRLMNPLIDQYLYYLNKTQSNSGTLQQSRLLFSQAGPTSMSLQAKNWLPGPCYRQQRLSKQANDNNNSNFPWTAATKYHLNGRDSLVNPGPAMASHKDDEEKFFPMHGTLIFGKQGTNANDADLDNVMITDEEEIRTTNPVATEQYGTVSNNLQNSNTGPTTGTVNHQGALPGMVWQDRDVYLQGPIWAKIPHTDGHFHPSPLMGGFGLKHPPPQIMIKNTPVPANPPTNFSSAKFASFITQYSTGQVSVEIEWELQKENSKRWNPEIQYTSNYNKSVNVDFTVDTNGVYSEPRPIGTRYLTRNL

SEQ ID NO: 4109 - protein, 735 aa, Artificial Sequence
  Description of Artificial Sequence: Synthetic polypeptide
MAADGYLPDWLEDTLSEGIRQWWKLKPGPPPPKPAERHKDDSRGLVLPGYKYLGPFNGLDKGEPVNEADAAALEHDKAYDRQLDSGDNPYLKYNHADAEFQERLKEDTSFGGNLGRAVFQAKKRVLEPLGLVEEPVKTAPGKKRPVEHSPVEPDSSSGTGKAGQQPARKRLNFGQTGDADSVPDPQPLGQPPAAPTSLGSTTMATGSGAPMADNNEGADGVGNSSGNWHCDSQWLGDRVITTSTRTWALPTYNNHLYKQISSQSGASNDNHYFGHSTPWGYFDFNRFHCHFSPRDWQRLINNNWGFRPKRLNFKLFNIQVKEVTQNDGTTTIANNLTSTVQVFTDSEYQLPYVLGSAHQGCLPPFPADVFMVPQYGYLTLNNGSQAVGRSSFYCLEYFPSQMLRTGNNFTFSYTFEDVPFHSSYAHSQSLDRLMNPLIDQYLYYLNKTQSNSGTLQQSRLLFSQAGPTSMSLQAKNWLPGPCYRQQRLSKQANDNNNSNFPWTAATKYHLNGRDSLVNPGPAMASHKDDEEKFFPMHGTLIFGKQGTNANDADLDNVMITDEEEIRTTNPVATEQYGTVSNNLQNSNTGPTTGTVNHQGALPGMVWQDRDVYLQGPIWAKIPHTDGHFHPSPLMGGFGLKHPPPQIMIKNTPVPANPPTNFSSAKFASFITQYSTGQVSVEIEWELQKENSKRWNPEIQYTSNYNKSVNVDFTVGTNGVYSEPRPIGTRYLTRNL

SEQ ID NO: 4110 - protein, 735 aa, Artificial Sequence
  Description of Artificial Sequence: Synthetic polypeptide
MAADGYLPDWLEDTLSEGIRQWWKLKPGPPPPKPAERHKDDSRGLVLPGYKYLGPFNGLDKGEPVNEADAAALEHDKAYDRQLDSGDNPYLKYNHADAEFQERLKEDTSFGGNLGRAVFQAKKRVLEPLGLVEEPVKTAPGKKRPVEHSPVEPDSSSGTGKAGQQPARKRLNFGQTGDADSVPDPQPLGQPPAAPTSLGSTTMATGSGAPMADNNEGADGVGNSSGNWHCDSQWLGDRVITTSTRTWALPTYNNHLYKQISSQSGASNDNHYFGHSTPWGYFDFNRFHCHFSPRDWQRLINNNWGFRPKRLNFKLFNIQVKEVTQNDGTTTIANNLTSTVQVFTDSEYQLPYVLGSAHQGCLPPFPADVFMVPQYGYLTLNNGSQAVGRSSFYCLEYFPSQMLRTGNNFTFSYTFEDVPFHSSYAHSQSLDRLMNPLIDQYLYYLNKTQSNSGTLQQSRLLFSQAGPTSTSLQAKNWLPGPCYRQQRLSKQANDNNNSNFPWTAATKYHLNGRDSLVNPGPAMASHKDDEEKFFPMHGTLIFGKQGTNANDADLDNVMITDEEEIRTTNPVATEQYGTVSNNLQNSNTGPTTGTVNHQGALPGMVWQDRDVYLQGPIWAKIPHTDGHFHPSPLMGGFGLKHPPPQIMIKNTPVPANPPTNFSSAKFASFITQYSTGQVSVEIEWELQKENSKRWNPEIQYTSNYNKSVNVDFTVDTNGVYSEPRPIGTRYLTRNL

SEQ ID NO: 4111 - protein, 735 aa, Artificial Sequence
  Description of Artificial Sequence: Synthetic polypeptide
MAADGYLPDWLEDTLSEGIRQWWKLKPGPPPPKPAERHKDDSRGLVLPGYKYLGPFNGLDKGEPVNEADAAALEHDKAYDRQLDSGDNPYLKYNHADAEFQERLKEDTSFGGNLGRAVFQAKKRVLEPLGLVEEPVKTAPGKKRPVEHSPVEPDSSSGTGKAGQQPARKRLNFGQTGDADSVPDPQPLGQPPAAPTSLGSTTMATGSGAPMADNNEGADGVGNSSGNWHCDSQWLGDRVITTSTRTWALPTYNNHLYKQISSQSGASNDNHYFGHSTPWGYFDFNRFHCHFSPRDWQRLINNNWGFRPKRLNFKLFNIQVKEVTQNDGTTTIANNLTSTVQVFTDSEYQLPYVLGSAHQGCLPPFPADVFMVPQYGYLTLNNGSQAVGRSSFYCLEYFPSQMLRTGNNFTFSYTFEDVPFHSSYAHSQSLDRLMNPLIDQYLYYLNKTQSNSGTLQQSRLLFSQAGPTSMSLQAKNWLPGPCYRQQRLSKQANDNNNSNFPWTAATKYHLNGRDSLVNPGPAMASHKDDEEKFFPMHGTLIFGKQGTNANDADLDNVMITDEEEIRTTNPVATEQYGTVSNNLQNSNTGPTTGTINHQGALPGMVWQDRDVYLQGPIWAKIPHTDGHFHPSPLMGGFGLKHPPPQIMIKNTPVPANPPTNFSSAKFASFITQYSTGQVSVEIEWELQKENSKRWNPEIQYTSNYNKSVNVDFTVDTNGVYSEPRPIGTRYLTRNL

SEQ ID NO: 4112 - protein, 735 aa, Artificial Sequence
  Description of Artificial Sequence: Synthetic polypeptide
MAADGYLPDWLEDTLSEGIRQWWKLKPGPPPPKPAERHKDDSRGLVLPGYKYLGPFNGLDKGEPVNEADAAALEHDKAYDRQLDSGDNPYLKYNHADAEFQERLKEDTSFGGNLGRAVFQAKKRVLEPLGLVEEPVKTAPGKKRPVEHSPVEPDSSSGTGKAGQQPARKRLNFGQTGDADSVPDPQPLGQPPAAPTSLGSTTMATGSGAPMADNNEGADGVGNSSGNWHCDSQWLGDRVITTSTRTWALPTYNNHLYKQISSQSGASNDNHYFGHSTPWGYFDFNRFHCHFSPRDWQRLINNNWGFRPKRLNFKLFNIQVKEVTQNDGTATIANNLTSTVQVFTDSEYQLPYVLGSAHQGCLPPFPADVFMVPQYGYLTLNNGSQAVGRSSFYCLEYFPSQMLRTGNNFTFSYTFEDVPFHSSYAHSQSLDRLMNPLIDQYLYYLNKTQSNSGTLQQSRLLFSQAGPTSMSLQAKNWLPGPCYRQQRLSKQANDNNNSNFPWTAATKYHLNGRDSLVNPGPAMASHKDDEEKFFPMHGTLIFGKQGTNANDADLDNVMITDEEEIRTTNPVATEQYGTVSNNLQNSNTGPTTGTVNHQGALPGMVWQDRDVYLQGPIWAKIPHTDGHFHPSPLMGGFGLKHPPPQIMIKNTPVPANPPTNFSSAKFASFITQYSTGQVSVEIEWELQKENSKRWNPEIQYTSNYNKSVNVDFTVDTNGVYSEPRPIGTRYLTRNL

SEQ ID NO: 4113 - protein, 735 aa, Artificial Sequence
  Description of Artificial Sequence: Synthetic polypeptide
MAADGYLPDWLEDTLSEGIRQWWKLKPGPPPPKPAERHKDDSRGLVLPGYKYLGPFNGLDKGEPVNEADAAALEHDKAYDRQLDSGDNPYLKYNHADAEFQERLKEDTSFGGNLGRAVFQAKKRVLEPLGLVEEPVKTAPGKKRPVEHSPVEPDSSSGTGKAGQQPARKRLNFGQTGDADSVPDPQPLGQPPAAPTSLGSTTMATGSGAPMADNNEGADGVGNSSGNWHCDSQWLGDRVITTSTRTWALPTYNNHLYKQISSQSGASNDNHYFGHSTPWGYFDFNRFHCHFSPRDWQRLINNNWGFRPKRLNFKLFNIQVKEVTQNDGTTTIANNLTSTVQVFTDSEYQLPYVLGSAHQGCLPPFPADVFMVPQYGYLTLNNGSQAVGRSSFYCLEYFPSQMLRTGNNFTFSYTFEDVPFHSSYAHSQSLDRLMNPLIDQYLYYLNKTQSNSGTLQQSRLLFSQAGPTSMSLQAKNWLPGPCYRQQRLSKQANDNNNSNFPWTVATKYHLNGRDSLVNPGPAMASHKDDEEKFFPMHGTLIFGKQGTNANDADLDNVMITDEEEIRTTNPVATEQYGTVSNNLQNSNTGPTTGTVNHQGALPGMVWQDRDVYLQGPIWAKIPHTDGHFHPSPLMGGFGLKHPPPQIMIKNTPVPANPPTNFSSAKFASFITQYSTGQVSVEIEWELQKENSKRWNPEIQYTSNYNKSVNVDFTVDTNGVYSEPRPIGTRYLTRNL

SEQ ID NO: 4114 - protein, 735 aa, Artificial Sequence
  Description of Artificial Sequence: Synthetic polypeptide
MAADGYLPDWLEDTLSEGIRQWWKLKPGPPPPKPAERHKDDSRGLVLPGYKYLGPFNGLDKGEPVNEADAAALEHDKAYDRQLDSGDNPYLKYNHADAEFQERLKEDTSFGGNLGRAVFQAKKRVLEPLGLVEEPVKTAPGKKRPVEHSPVEPDSSSGTGKAGQQPARKRLNFGQTGDADSVPDPQPLGQPPAAPTSLGSTTMATGSGAPMADNNEGADGVGNSSGNWHCDSQWLGDRVITTSTRTWALPTYNNHLYKQISSQSGASNDNHYFGHSTPWGYFDFNRFHCHFSPRDWQRLINNNWGFRPKRLNFKLFNIQVKEVTQNDGTTTIANNLTSTVQVFTDSEYQLPYVLGSAHQGCLPPFPADVFMVPQYGYLTLNNGSQAVGRSSFYCLEYFPSQMLRTGNNFTFSYTFEDVPFHSSYAHSQSLDRLMNPLIDQYLYYLNKTQSNSGTLQQSRLLFSQAGPTSMSLQAKNWLPGPCYRQQRLSKQANDNNNSNFPWTAATKYHLNGRDSLVNPGPAMASHKDDEEKFFPMHGTLIFGKQGTNANDADLDNVMITDEEEIRTTNPVATEQYGTVSNNLQNSNTGPTTGTVNHQGALPGMVWQDRDVYLQGPIWAKIPHTDGHFHPSPLMGGFGLKHPPPQIMIKNTPVPANPPTNFSSAKFASFITQHSTGQVSVEIEWELQKENSKRWNPEIQYTSNYNKSVNVDFTVDTNGVYSEPRPIGTRYLTRNL

SEQ ID NO: 4115 - protein, 735 aa, Artificial Sequence
  Description of Artificial Sequence: Synthetic polypeptide
MAADGYLPDWLEDTLSEGIRQWWKLKPGPPPPKPAERHKDDGRGLVLPGYKYLGPFNGLDKGEPVNEADAAALEHDKAYDRQLDSGDNPYLKYNHADAEFQERLKEDTSFGGNLGRAVFQAKKRVLEPLGLVEEPVKTAPGKKRPVEHSPVEPDSSSGTGKAGQQPARKRLNFGQTGDADSVPDPQPLGQPPAAPTSLGSTTMATGSGAPMADNNEGADGVGNSSGNWHCDSQWLGDRVITTSTRTWALPTYNNHLYKQISSQSGASNDNHYFGYSTPWGYFDFNRFHCHFSPRDWQRLINNNWGFRPKRLNFKLFNIQVKEVTQNDGTTTIANNLTSTVQVFTDSEYQLPYVLGSAHQGCLPPFPADVFMVPQYGYLTLNNGSQAVGRSSFYCLEYFPSQMLRTGNNFTFSYTFEDVPFHSSYAHSQSLDRLMNPLIDQYLYYLNKTQSNSGTLQQSRLLFSQAGPTSMSLQAKNWLPGPCYRQQRLSKQANDNNNSNFPWTAATKYHLNGRDSLVNPGPAMASHKDDEEKFFPMHGTLIFGKQGTNANDADLDNVMITDEEEIRTTNPVATEQYGTVSNNLQNSNTGPTTGTVNHQGALPGMVWQDRDVYLQGPIWAKIPHTDGHFHPSPLMGGFGLKHPPPQIMIKNTPVPANPPTNFSSAKFASFITQYSTGQVSVEIEWELQKENSKRWNPEIQYTSNYNKSVNVDFTVDTNGVYSEPRPIGTRYLTRNL

SEQ ID NO: 4116 - protein, 735 aa, Artificial Sequence
  Description of Artificial Sequence: Synthetic polypeptide
MAADGYLPDWLEDTLSEGIRQWWKLKPGPPPPKPAERHKDDSRGLVLPGYKYLGPFNGLDKGEPVNEADAAALEHDKAYDRQLDSGDNPYLKYNHADAELQERLKEDTSFGGNLGRAVFQAKKRVLEPLGLVEEPVKTAPGKKRPVEHSPVEPDSSSGTGKAGQQPARKRLNFGQTGDADSVPDPQPLGQPPAAPTSLGSTTMATGSGAPMADNNEGADGVGNSSGNWHCDSQWLGDRVITTSTRTWALPTYNNHLYKQISSQSGASNDNHYFGYSTPWGYFDFNRFHCHFSPRDWQRLINNNWGFRPKRLNFKLFNIQVKEVTQNDGTTTIANNLTSTVQVFTDSEYQLPYVLGSAHQGCLPPFPADVFMVPQYGYLTLNNGSQAVGRSSFYCLEYFPSQMLRTGNNFTFSYTFEDVPFHSSYAHSQSLDRLMNPLIDQYLYYLNKTQSNSGTLQQSRLLFSQAGPTSMSLQAKNWLPGPCYRQQRLSKQANDNNNSNFPWTAATKYHLNGRDSLVNPGPAMASHKDDEEKFFPMHGTLIFGKQGTNANDADLDNVMITDEEEIRTTNPVATEQYGTVSNNLQNSNTGPTTGTVNHQGALPGMVWQDRDVYLQGPIWAKIPHTDGHFHPSPLMGGFGLKHPPPQIMIKNTPVPANPPTNFSSAKFASFITQYSTGQVSVEIEWELQKENSKRWNPEIQYTSNYNKSVNVDFTVDTNGVYSEPRPIGTRYLTRNL

SEQ ID NO: 4117 - protein, 735 aa, Artificial Sequence
  Description of Artificial Sequence: Synthetic polypeptide
MAADGYLPDWLEDTLSEGIRQWWKLKPGPPPPKPAERHKDDSRGLVLPGYKYLGPFNGLDKGEPVNEADAAALEHDKAYDRQLDSGDNPYLKYNHADAEFQERLKEDTSFGGNLGRAVFQAKKRVLEPLGLVEEPVKTAPGKKRPVEHSPVEPDSSSGTGKAGQQPARKRLNFGQTGDADSVPDPQPLGQPPAAPTSLGSTTMATGSGAPMADNNEGADGVGNSSGNWHCDSQWLGDRVITTSTRTWALPTYNNHLYKQISSQSGASNDNHYFGYSTPWGYFDFNRFHCHFSPRDWQRLINNNWGFRPKRLNFKLFNIQVKEVTQNDGTTTIANNLTSTVQVFTDSEYQLPYVLGSAHQGCLPPFPADVFMVPQYGYLTLNNGSQAVGRSSFYCLEYFPSQMLRTGNNFTFSYTFEDVPFHSSYAHSQSLDRLMNPLIDQYLYYLNKTQSNSGTLQQSRLLFSQAGPTSMSLQAKNWLPGPCYRQQRLSKQANDNNNSNFPWTAATKYHLNGRDSLVNPGPAMASHKDDEEKFFPMHGTLIFGKQGTNANDADLDNVMITDEEEIRTTNPVATEQYGTVSNNLQNSNTGPTTGTVNHQGALPGMVWQDRDVYLQGPIWAKIPHTDGHFHPSPLVGGFGLKHPPPQIMIKNTPVPANPPTNFSSAKFASFITQYSTGQVSVEIEWELQKENSKRWNPEIQYTSNYNKSVNVDFTVDTNGVYSEPRPIGTRYLTRNL

SEQ ID NO: 4118 - protein, 735 aa, Artificial Sequence
  Description of Artificial Sequence: Synthetic polypeptide
MAADGYLPDWLEDTLSEGIRQWWKLKPGPPPPKPAERHKDDSRGLVLPGYKYLGPFNGLDKGEPVNEADAAALEHDKAYDRQLDSGDNPYLKYNHADAEFQERLKEDTSFGGNLGRAVFQAKKRVLEPLGLVEEPVKTAPGKKRPVEHSPVEPDSSSGTGKAGQQPARKRLNFGQTGDADSVPDPQPLGQPPAAPTSLGSTTMATGSGAPMADNNEGADGVGNSSGNWHCDSQWLGDRVITTSTRTWALPTYNNHLYKQISSQSGASNDNHYFGYSTPWGYFDFNRFHCHFSPRDWQRLINNNWGFRPKRLNFKLFNIQVKEVTQNDGTTTIANNLTSTVQVFTDSEYQLPYVLGSAHQGCLPPFPADVFMVPQYGYLTLNNGSQAVGRSSFYCLEYFPSQMLRTGNNFTFSYTFEDVPFHSSYAHSQSLDRLMNPLIDQYLYYLNKTQSNSGTLQQSRLLFSQAGPTSMSLQAKNWLPGPCYRQQRLSKQANDNNNSNFPWTAATKYHLNGRDSLVNPGPAMASHKDDEEKFFPMHGTLIFGKQGTNANDADLDNVMITDEEEIRTTNPVATEQYGTVSNNLQNSNTGPTTGTVNHQGALPGMVWQDRDVYLQGPIWAKIPHTDGHFHPSPLMGGFGLKHPPPQIMIKNTPVPANPPTNFSSAKFASFITQYSTGQVGVEIEWELQKENSKRWNPEIQYTSNYNKSVNVDFTVDTNGVYSEPRPIGTRYLTRNL

SEQ ID NO: 4119 - protein, 735 aa, Artificial Sequence
  Description of Artificial Sequence: Synthetic polypeptide
MAADGYLPDWLEDTLSEGIRQWWKLKPGPPPPKPAERHKDDSRGLVLPGYKYLGPFNGLDKGEPVNEADAAALEHDKAYDRQLDSGDNPYLKYNHADAEFQERLKEDTSFGGNLGRAVFQAKKRVLEPLGLVEEPVKTAPGKKRPVEHSPVEPDSSSGTGKAGQQPARKRLNFGQTGDADSVPDPQPLGQPPAAPTSLGSTTMATGSGAPMADNNEGADGVGNSSGNWHCDSQWLGDRVITTSTRTWALPTYNNHLYKQISSQSGASNDNHYFGYSTPWGYFDFNRFHCHFSPRDWQRLINNNWGFRPKRLNFKLFNIQVKEVTQNDGTTTIANNLTSTVQVFTDSEYQPPYVLGSAHQGCLPPFPADVFMVPQYGYLTLNNGSQAVGRSSFYCLEYFPSQMLRTGNNFTFSYTFEDVPFHSSYAHSQSLDRLMNPLIDQYLYYLNKTQSNSGTLQQSRLLFSQAGPTSMSLQAKNWLPGPCYRQQRLSKQANDNNNSNFPWTAATKYHLNGRDSLVNPGPAMASHKDDEEKFFPMHGTLIFGKQGTNANDADLDNVMITDEEEIRTTNPVATEQYGTVSNNLQNSNTGPTTGTVNHQGALPGMVWQDRDVYLQGPIWAKIPHTDGHFHPSPLMGGFGLKHPPPQIMIKNTPVPANPPTNFSSAKFASFITQYSTGQVSVEIEWELQKENSKRWNPEIQYTSNYNKSVNVDFTVDTNGVYSEPRPIGTRYLTRNL

SEQ ID NO: 4120 - protein, 735 aa, Artificial Sequence
  Description of Artificial Sequence: Synthetic polypeptide
MAADGYLPDWLEDTLSEGIRQWWKLKPGPPPPKPAERHKDDSRGLVLPGYKYLGPFNGLDKGEPVNEADAAALEHDKAYDRQLDSGDNPYLKYNHADAEFQERLKEDTSFGGNLGRAVFQAKKRVLEPLGLVEEPVKTAPGKKRPVEHSPVEPDSSSGTGKAGQQPARKRLNFGQTGDADSVPDPQPLGQPPAAPTSLGSTTMATGSGAPMADNDEGADGVGNSSGNWHCDSQWLGDRVITTSTRTWALPTYNNHLYKQISSQSGASNDNHYFGYSTPWGYFDFNRFHCHFSPRDWQRLINNNWGFRPKRLNFKLFNIQVKEVTQNDGTTTIANNLTSTVQVFTDSEYQLPYVLGSAHQGCLPPFPADVFMVPQYGYLTLNNGSQAVGRSSFYCLEYFPSQMLRTGNNFTFSYTFEDVPFHSSYAHSQSLDRLMNPLIDQYLYYLNKTQSNSGTLQQSRLLFSQAGPTSMSLQAKNWLPGPCYRQQRLSKQANDNNNSNFPWTAATKYHLNGRDSLVNPGPAMASHKDDEEKFFPMHGTLIFGKQGTNANDADLDNVMITDEEEIRTTNPVATEQYGTVSNNLQNSNTGPTTGTVNHQGALPGMVWQDRDVYLQGPIWAKIPHTDGHFHPSPLMGGFGLKHPPPQIMIKNTPVPANPPTNFSSAKFASFITQYSTGQVSVEIEWELQKENSKRWNPEIQYTSNYNKSVNVDFTVDTNGVYSEPRPIGTRYLTRNL

SEQ ID NO: 4121 - protein, 735 aa, Artificial Sequence
  Description of Artificial Sequence: Synthetic polypeptide
MAADGYLPDWLEDTLSEGIRQWWKLKPGPPPPKPAERHKDDSRGLVLPGYKYLGPFNGLDKGEPVNEADAAALEHDKAYDRQLDSGDNPYLKYNHADAEFQERLKEDTSFGGNLGRAVFQAKKRVLEPLGLVEEPVKTAPGKKRPVEHSPVEPDSSSGTGKAGQQPARKRLNFGQTGDADSVPDPQPLGQPPAAPTSLGSTTMATGSGAPMADNNEGADGVGNSSGNWHCDSQWLGDRVITTSTRTWALPTYNNHLYKQISSQSGASNDNHYFGYSTPWGYFDFNRFHCHFSPRDWQRLINNNWGFRPKRLNFKLFNIQVKEVTQNDGTTTIANNLTSTVQVFTDSEYQLPYVLGSAHQGCLPPFPADVFMVPQYGYLTLNNGSQAVGRSSFYCLEYFPSQMLRTGNNFTFSYTFEDVPFHSSYAHSQSLDRLMNPLIDQYLYYLNKTQSNSGTLQQSRLLFSQAGPTSMSLQAKNWLPGPCYRQQRLPKQANDNNNSNFPWTAATKYHLNGRDSLVNPGPAMASHKDDEEKFFPMHGTLIFGKQGTNANDADLDNVMITDEEEIRTTNPVATEQYGTVSNNLQNSNTGPTTGTVNHQGALPGMVWQDRDVYLQGPIWAKIPHTDGHFHPSPLMGGFGLKHPPPQIMIKNTPVPANPPTNFSSAKFASFITQYSTGQVSVEIEWELQKENSKRWNPEIQYTSNYNKSVNVDFTVDTNGVYSEPRPIGTRYLTRNL

SEQ ID NO: 4122 - protein, 735 aa, Artificial Sequence
  Description of Artificial Sequence: Synthetic polypeptide
MAADGYLPDWLEDTLSEGIRQWWKLKPGPPPPKPAERHKDDSRGLVLPGYKYLGPFNGLDKGEPVNEADAAALEHDKAYDRQLDSGDNPYLKYNHADAEFQERLKEDTSFGGNLGRAVFQAKKRVLEPLGLVEEPVKTAPGKKRPVEHSPVEPDSSSGTGKAGQQPARKRLNFGQTGDADSVPDPQPLGQPPAAPTSLGSTTMATGSGAPMADNNEGADGVGNSSGNWHCDSQWLGDRVITTSTRTWALPTYNNHLYKQISSQSGASNDNHYFGYSTPWGYFDFNRFHCHFSPRDWQRLINNNWGFRPKRLNFKLFNIQVKEVTQNDGTTTIANNLTSTVQVFTDSEYQLPYVLGSAHQGCLPPFPADVFMVPQYGYLTLNNGSQAVGRSSFYCLEYFPSQMLRTGNNFTFSYTFEDVPFHSSYAHSQSLDRLMNPLIDQYLYYLNKTQSNSGTLQQSRLLFSQAGPTSMSLQAKNWLPGPCYRQQRLSKQANDNNNSNFPWTAATKYHLNGRDSLVNPGPAMASHKDDEEKFFPMHGTLIFGKQGTNANDADLDNVMITDEEEIRTTNPVATEQYGTVSNNLQNSNTGPTTGTVNHQGALPGMVWQDRDVYLQGPIWAKIPHTDGHFHPSPLMGGFGLKHPPPQIMIKNTPVPANPPTNLSSAKFASFITQYSTGQVSVEIEWELQKENSKRWNPEIQYTSNYNKSVNVDFTVDTNGVYSEPRPIGTRYLTRNL

SEQ ID NO: 4123 - protein, 735 aa, Artificial Sequence
  Description of Artificial Sequence: Synthetic polypeptide
MAADGYLPDWLEDTLSEGIRQWWKLKPGPPPPKPAERHKDDSRGLVLPGYKYLGPFNGLDKGEPVNEADAAALEHDKAYDRQLDSGDNPYLKYNHADAEFQERLKEDTSFGGNLGRAVFQAKKRVLEPLGLVEEPVKTAPGKKRPVEHSPVEPDSSSGTGKAGQQPARKRLNFGQTGDADSVPDPQPLGQPPAAPTSLGSTTMATGSGAPMADNNEGADGVGNSSGNWHCDSQWLGDRVITTSTRTWALPTYNNHLYKQISSQSGASNDNHYFGYSTPWGYFDFNRFHCHFSPRDWQRLINNNWGFRPKRLNFKLFNIQVKEVTQNDGTTTIANNLTSTVQVFTDSEYQLPYVLGSAHQGCLPPFPADVFMVPQYGYLTPNNGSQAVGRSSFYCLEYFPSQMLRTGNNFTFSYTFEDVPFHSSYAHSQSLDRLMNPLIDQYLYYLNKTQSNSGTLQQSRLLFSQAGPTSMSLQAKNWLPGPCYRQQRLSKQANDNNNSNFPWTAATKYHLNGRDSLVNPGPAMASHKDDEEKFFPMHGTLIFGKQGTNANDADLDNVMITDEEEIRTTNPVATEQYGTVSNNLQNSNTGPTTGTVNHQGALPGMVWQDRDVYLQGPIWAKIPHTDGHFHPSPLMGGFGLKHPPPQIMIKNTPVPANPPTNFSSAKFASFITQYSTGQVSVEIEWELQKENSKRWNPEIQYTSNYNKSVNVDFTVDTNGVYSEPRPIGTRYLTRNL

SEQ ID NO: 4124 - protein, 735 aa, Artificial Sequence
  Description of Artificial Sequence: Synthetic polypeptide
MAADGYLPDWLEDTLSEGIRQWWKLKPGPPPPKPAERHKDDSRGLVLPGYKYLGPFNGLDKGEPVNEADAAALEHDKAYDRQLDSGDNPYLKYNHADAEFQERLKEDTSFGGNLGRAVFQAKKRVLEPLGLVEEPVKTAPGKKRPVEHSPVEPDSSSGTGKAGQQPARKRLNFGQTGDADSVPDPQPLGQPPAAPTSLGSTTMATGSGAPMADNNEGADGVGNSSGNWHCDSQWLGDRVITTSTRTWALPTYNNHLYKQISSQSGASNDNHYFGYSTPWGYFDFNRFHCHFSPRDWQRLINNNWGFRPKRLNFKLFNIQVKEVTQNDGTTTIANNLTSTVQVFTDSEYQLPYVLGSAHQGCLPPFPADVFMVPQYGYLTLNNGSQAVGRSSFYCLEYFPSQMLRTGNNFTFSYTFEDVPFHSSYAHSQSLDRLMNPLIDQYLYYLNKTQSNSGTLRQSRLLFSQAGPTSMSLQAKNWLPGPCYRQQRLSKQANDNNNSNFPWTAATKYHLNGRDSLVNPGPAMASHKDDEGKFFPMHGTLIFGKQGTNANDADLDNVMITDEEEIRTTNPVATEQYGTVSNNLQNSNTGPTTGTVNHQGALPGMVWQDRDVYLQGPIWAKIPHTDGHFHPSPLMGGFGLKHPPPQIMIKNTPVPANPPTNFSSAKFASFITQYSTGQVSVEIEWELQKENSKRWNPEIQYTSNYNKSVNVDFTVDTNGVYSEPRPIGTRYLTRNL

SEQ ID NO: 4125 - protein, 735 aa, Artificial Sequence
  Description of Artificial Sequence: Synthetic polypeptide
MAADGYLPDWLEDTLSEGIRQWWKLKPGPPPPKPAERHKDDSRGLVLPGYKYLGPFNGLDKGEPVNEADAAALEHDKAYDRQLDSGDNPYLKYNHADAEFQERLKEDTSFGGNLGRAVFQAKKRVLEPLGLVEEPVKTAPGKKRPVEHSPVEPDSSSGTGKAGQQPARKRLNFGQTGDADSVPDPQPLGQPPAAPTSLGSTTMATGSGAPMADNNEGADGVGNSSGNWHCDSQWLGDRVITTSTRTWALPTYNNHLYKQISSQSGASNDNHYFGYSTPWGYFDFNRFHCHFSPRDWQRLINNNWGFRPKRLNFKLFNIQVKEVTQNDGTTTIANNLTSTVQVFTDSEYQLPYVLGSAHQGCLPPFPADVFMVPQYGYLTLNNGSQAVGRSSFYCLEYFPSQMLRTGNNFTFSYTFEDVPFHSSYAHSQSLDRLMNPLIDQYLYYLNKTQSNSGTLQQSRLLFSQAGPTSMSLQAKNWLPGPCYRQQRLSKQANDNNNSNFPWTAATKYHLNGRDSLVNPGPAMASHKDDEEKFFPMHGTLIFGKQGTNANDADLDNAMITDEEEIRTTNPVATEQYGTVSNNLQNSNTGPTTGTVNHQGALPGMVWQDRDVYLQGPIWAKIPHTDGHFHPSPLMGGFGLKHPPPQIMIKNTPVPANPPTNFSSAKFASFITQYSTGQVSVEIEWELQKENSKRWNPEIQYTSNYNKSVNVDFTVDTNGVYSEPRPIGTRYLTRNL

SEQ ID NO: 4126 - protein, 735 aa, Artificial Sequence
  Description of Artificial Sequence: Synthetic polypeptide
MAADGYLPDWLEDTLSEGIRQWWKLKPGPPPPKPAERHKDDSRGLVLPGYKYLGPFNGLDKGEPVNEADAAALEHDKAYDRQLDSGDNPYLKYNHADAEFQERLKEDTSFGGNLGRAVFQAKKRVLEPLGLVEEPVKTAPGKKRPVEHSPVEPDSSSGTGKAGQQPARKRLNFGQTGDADSVPDPQPLGQPPAAPTSLGSTTMATGSGAPMAGNNEGADGVGNSSGNWHCDSQWLGDRVITTSTRTWALPTYNNHLYKQISSQSGASNDNHYFGYSTPWGYFDFNRFHCHFSPRDWQRLINNNWGFRPKRLNFKLFNIQVKEVTQNDGTTTIANNLTSTVQVFTDSEYQLPYVLGSAHQGCLPPFPADVFMVPQYGYLTLNNGSQAVGRSSFYCLEYFPSQMLRTGNNFTFSYTFEDVPFHSSYAHSQSLDRLMNPLIDQYLYYLNKTQSNSGTLQQSRLLFSQAGPTSMSLQAKNWLPGPCYRQQRLSKQANDNNNSNFPWTAATKYHLNGRDSLVNPGPAMASHKDDEEKFFPMHGTLIFGKQGTNANDADLDNVMITDEEEIRTTNPVATEQYGTVSNNLQNSNTGPTTGTVNHQGALPGMVWQDRDVYLQGPIWAKIPHTDGHFHPSPLMGGFGLKHPPPQIMIKNTPVPANPPTNFSSAKFASFITQYSTGQVSVEIEWELQKENSKRWNPEIQYTSNYNKSVNVDFTVDTNGVYSEPRPIGTRYLTRNL

SEQ ID NO: 4127 - protein, 735 aa, Artificial Sequence
  Description of Artificial Sequence: Synthetic polypeptide
MAADGYLPDWLEDTLSEGIRQWWKLKPGPPPPKPAERHKDDSRGLVLPGYKYLGPFNGLDKGEPVNEADAAALEHDKAYDRQLDSGDNPYLKYNHADAEFQERLKEDTSFGGNLGRAVFQAKKRVLEPLGLVEEPVKTAPGKKRPVEHSPVEPDSSSGTGKAGQQPARKRLNFGQTGDADSVPDPQPLGQPPAAPTSLGSTTMATGSGAPMADNNEGADGVGNSSGNWHCDSQWLGDRVITTSTRTWALPTYNNHLYKQISSQSGASNDNHYFGYSTPWGYFDFNRFHCHFSPRDWQRLINNNWGFRPKRLNFKLFNIQVKEVAQNDGTTTIANNLTSTVQVFTDSEYQLPYVLGSAHQGCLPPFPADVFMVPQYGYLTLNNGSQAVGRSSFYCLEYFPSQMLRTGNNFTFSYTFEDVPFHSSYAHSQSLDRLMNPLIDQYLYYLNKTQSNSGTLQQSRLLFSQAGPTSMSLQAKNWLPGPCYRQQRLSKQANDNNNSNFPWTAATKYHLNGRDSLVNPGPAMASHKDDEEKFFPMHGTLIFGKQGTNANDADLDNVMITDEEEIRTTNPVATEQYGTVSNNLQNSNTGPTTGTVNHQGALPGMVWQDRDVYLQGPIWAKIPHTDGHFHPSPLMGGFGLKHPPPQIMIKNTPVPANPPTNFSSAKFASFITQYSTGQVSVEIEWELQKENSKRWNPEIQYTSNYNKSVNVDFTVDTNGVYSEPRPIGTRYLTRNL

SEQ ID NO: 4128 - protein, 735 aa, Artificial Sequence
  Description of Artificial Sequence: Synthetic polypeptide
MAADGYLPDWLEDTLSEGIRQWWKLKPGPPPPKPAERHKDDSRGLVLPGYKHLGPFNGLDKGEPVNEADAAALEHDKAYDRQLDSGDNPYLKYNHADAEFQERLKEDTSFGGNLGRAVFQAKKRVLEPLGLVEEPVKTAPGKKRPVEHSPVEPDSSSGTGKAGQQPARKRLNFGQTGDADSVPDPQPLGQPPAAPTSLGSTTMATGSGAPMADNNEGADGVGNSSGNWHCDSQWLGDRVITTSTRTWALPTYNNHLYKQISSQSGASNDNHYFGYSTPWGYFDFNRFHCHFSPRDWQRLINNNWGFRPKRLNFKLFNIQVKEVTQNDGTTTIANNLTSTVQVFTDSEYQLPYVLGSAHQGCLPPFPADVFMVPQYGYLTLNNGSQAVGRSSFYCLEYFPSQMLRTGNNFTFSYTFEDVPFHSSYAHSQSLDRLMNPLIDQYLYYLNKTQSNSGTLQQSRLLFSQAGPTSMSLQAKNWLPGPCYRQQRLSKQANDNNNSNFPWTAATKYHLNGRDSLVNPGPAMASHKDDEEKFFPMHGTLIFGKQGTNANDADLDNVMITDEEEIRTTNPVATEQYGTVSNNLQNSNTGPTTGTVNHQGALPGMVWQDRDVYLQGPIWAKIPHTDGHFHPSPLMGGFGLKHPPPQIMIKNTPVPANPPTNFSSAKFASFITQYSTGQVSVEIEWELQKENSKRWNPEIQYTSNYNKSVNVDFTVDTNGVYSEPRPIGTRYLTRNL

SEQ ID NO: 4129 - protein, 735 aa, Artificial Sequence
  Description of Artificial Sequence: Synthetic polypeptide
MAADGYLPDWPEDTLSEGIRQWWKLKPGPPPPKPAERHKDDSRGLVLPGYKYLGPFNGLDKGEPVNEADAAALEHDKAYDRQLDSGDNPYLKYNHADAEFQERLKEDTSFGGNLGRAVFQAKKRVLEPLGLVEEPVKTAPGKKRPVEHSPVEPDSSSGTGKAGQQPARKRLNFGQTGDADSVPDPQPLGQPPAAPTSLGSTTMATGSGAPMADNNEGADGVGNSSGNWHCDSQWLGDRVITTSTRTWALPTYNNHLYKQISSQSGASNDNHYFGYSTPWGYFDFNRFHCHFSPRDWQRLINNNWGFRPKRLNFKLFNIQVKEVTQNDGTTTIANNLTSTVQVFTDSEYQLPYVLGSAHQGCLPPFPADVFMVPQYGYLTLNNGSQAVGRSSFYCLEYFPSQMLRTGNNFTFSYTFEDVPFHSSYAHSQSLDRLMNPLIDQYLYYLNKTQSNSGTLQQSRLLFSQAGPTSMSLQAKNWLPGPCYRQQRLSKQANDNNNSNFPWTAATKYHLNGRDSLVNPGPAMASHKDDEEKFFPMHGTLIFGKQGTNANDADLDNVMITDEEEIRTTNPVATEQYGTVSNNLQNSNTGPTTGTVNHQGALPGMVWQDRDVYLQGPIWAKIPHTDGHFHPSPLMGGFGLKHPPPQIMIKNTPVPANPPTNFSSAKFASFITQYSTGQVSVEIEWELQKENSKRWNPEIQYTSNYNKSVNVDFTVDTNGVYSEPRPIGTRYLTRNL

SEQ ID NO: 4130 - protein, 735 aa, Artificial Sequence
  Description of Artificial Sequence: Synthetic polypeptide
MAADGYLPDWLEDTLSEGIRQWWKLKPGPPPPKPAERHKDDSRGLVLPGYKYLGPFNGLDKGEPVNEADAAALEHDKAYDRQLDSGDNPYLKYNHADAEFQERLKEDTSFGGNLGRAVFQAKKRVLEPLGLVEEPVKTAPGKKRPVEHSPVEPDSSSGTGKAGQQPARKRLNFGQTGDADSVPDPQPLGQPPAAPTSLGSTTMATGSGAPMADNNEGADGVGNSSGNWHCDSQWLGDRVITTSTRTWALPTYNNHLYKQISSQSGASNDNHYFGYSTPWGYFDFNRFHCHFSPRDWQRLINNNWGFRPKRLNFKLFNIQVKEVTQNDGTTTIANNLTSTVQVFTDSEYQLPYVLGSAHQGCLPPFPADVFMVPQYGYLTLNNGSQAVGRSSFYCLEYFPSQMLRTGNNFTFSYTFEDVPFHSSYAHSQSLDRLMNPLIDQYLYYLNKTQSNSGTLQQSRLLFSQAGPTSMSLQAKNWLPGPCYRQQRLSKQANDNNNSNFPWTAATKYHLNGRDSLVNPGPAMASHKDDEEKFFPMHGTLIFGKQGTNANDADLDNVMITDEEEIRTTNPVATEQYGTVSNNLQNSNTGPTTGTVNHQGALPGMVWQDRGVYLQGPIWAKIPHTDGHFHPSPLMGGFGLKHPPPQIMIKNTPVPANPPTNFSSAKFASFITQYSTGQVSVEIEWELQKENSKRWNPEIQYTSNYNKSVNVDFTVDTNGVYSEPRPIGTRYLTRNL

SEQ ID NO: 4131 - protein, 735 aa, Artificial Sequence
  Description of Artificial Sequence: Synthetic polypeptide
MAADGYLPDWLEDTLSEGIRQWWKLKPGPPPPKPAERHKDDSRGLVLPGYKYLGPFNGLDKGEPVNEADAAALEHDKAYDRQLDSGDNPYLKYNHADAEFQERLKEDTSFGGNLGRAVFQAKKRVLEPLGLVEEPVKTAPGKKRPVEHSPVEPDSSSGTGKAGQQPARKRLNFGQTGDADSVPDPQPLGQPPAAPTSLGSTTMATGSGAPMADNNEGADGVGNSSGNWHCDSQWLGDRVITTSTRTWALPTYNNHLYKQISSQSGASNDNHYFGYSTPWGYFDFNRFHCHFSPRDWQRLINNNWGFRPKRLNFKLFNIQVKEVTQNDGTTTIANNLTSTVQVFTDSEYQLPYVLGSAHQGCLPPFPADVFMVPQYGYLTLNNGSQAVGRSSFYCLEYFPSQMLRTGNNFTFSYTFEDVPFHSSYAHSQSLDRLMNPLIDQYLYYLNKTQSNSGTLQQSRLLFSQAGPTSMSLQAKNWLPGPCYRQQRLSKQANDNNNSNFPWTAATKYHLNGRDSLVNPGPAMASHKDDEEKFFPMHGTLIFGKQGTNANDADLDNVMITDEEEIRTTNPVATEQYGTVSNNLQNSNTGPTTGTVNHQGALPGMVWQDRDVYLQGPIWAKIPHTDGHFHPSPLMGGFGLKHPPPQIMIKNTPVPANPPTNFSSAKFASFITQYSTGQVSVEIEWELQKENSKRWNPEIQYTSNYNKSVNVDFTVGTNGVYSEPRPIGTRYLTRNL

SEQ ID NO: 4132 - protein, 735 aa, Artificial Sequence
  Description of Artificial Sequence: Synthetic polypeptide
MAADGYLPDWLEDTLSEGIRQWWKLKPGPPPPKPAERHQDDSRGLVLPGYKYLGPLNGLDKGEPVNEADAAALEHDKAYDRQLDSGDNPYLKYNHADAEFQERLKEDTSFGGNLGRAVFQAKKRVLEPLGLVEEPVKTAPGKKRPVEHSPAEPDSSSGTGKAGQQPARKRLNFGQTGDADSVPDPQPLGQPPAAPTSLGSTTMATGSGAPMADNNEGADGVGNSSGNWHCDSQWLGDRVITTSTRTWALPTYNNHLYKQISSQSGASNDNHYFGYSTPWGYFDFNRFHCHFSPRDWQRLINNNWGFRPKRLNFKLFNIQVKEVTQNDGTTTIANNLTSTVQVFTDSEYQLPYVLGSAHQGCLPPFPADVFMVPQYGYLTLNNGSQAVGRSSFYCLEYFPSQMLRTGNNFTFSYTFEDVPFHSSYAHSQSLDRLMNPLIDQYLYYLNRTQSNSGTLQQSRLLFSQAGPTSMSLQAKNWLPGPCYRQQRLSKQANDNNNSNFPWTAATKYHLNGRDSLVNPGPAMASHKDDEEKFFPMHGTLIFGKQGTNANDADLEHVMITDEEEIRTTNPVATEQYGNVSNNLQNSNTGPTTENVNHQGALPGMVWQDRDVYLQGPIWAKIPHTDGHFHPSPLMGGFGLKHPPPQIMIKNTPVPANPPTNFSAAKFASFITQYSTGQVSVEIEWELQKENSKRWNPEIQYTSNYNKSVNVDFTVDTNGVYSEPRPIGTRYLTRNL

SEQ ID NO: 4133 - protein, 735 aa, Artificial Sequence
  Description of Artificial Sequence: Synthetic polypeptide
MAADGYLPDWLEDTLSEGIRQWWKLKPGPPPPKPAERHQDDSRGLVLPGYKYLGPFNGLDKGEPVNEADAAALEHDKAYDRQLDSGDNPYLKYNHADAEFQERLKEDTSFGGNLGRAVFQAKKRVLEPLGLVEEPVKTAPGKKRPVEHSPAEPDSSSGTGKAGQQPARKRLNFGQTGDADSVPDPQPLGQPPAAPTSLGSTTMATGSGAPMADNNEGADGVGNSSGNWHCDSQWLGDRVITTSTRTWALPTYNNHLYKQISSQSGASNDNHYFGYSTPWGYFDFNRFHCHFSPRDWQRLINNNWGFRPKRLNFKLFNIQVKEVTQNDGTTTIANNLTSTIQVFTDSEYQLPYVLGSAHQGCLPPFPADVFMVPQYGYLTLNNGSQAVGRSSFYCLEYFPSQMLRTGNNFTFSYTFEDVPFHSSYAHSQSLDRLMNPLIDQYLYYLNRTQSNSGTLQQSRLLFSQAGPTSMSLQAKNWLPGPCYRQQRLSKQANDNNNSNFPWTAATKYHLNGRDSLVNPGPAMASHKDDEEKFFPMHGTLIFGKQGTNANDADLEHVMITDEEEIRTTNPVATEQYGNVSNNLQNSNTGPTTENVNHQGALPGMVWQDRDVYLQGPIWAKIPHTDGHFHPSPLMGGFGLKHPPPQIMIKNTPVPANPPTNFSAAKFASFITQYSTGQVSVEIEWELQKENSKRWNPEIQYTSNYNKSVNVDFTVDTNGVYSEPRPIGTRYLTRNL

SEQ ID NO: 4134 - protein, 735 aa, Artificial Sequence
  Description of Artificial Sequence: Synthetic polypeptide
MAADGYLPDWLEDTLSEGIRQWWKLKPGPPPPKPAERHQDDSRGLVLPGYKYLGPFNGLDKGEPVNEADAAALEHDKAYDRQLDSGDNPYLKYNHADAEFQERLKEDTSFGGNLGRAVFQAKKRVLEPLGLVEEPVKTAPGKKRPVGHSPAEPDSSSGTGKAGQQPARKRLNFGQTGDADSVPDPQPLGQPPAAPTSLGSTTMATGSGAPMADNNEGADGVGNSSGNWHCDSQWLGDRVITTSTRTWALPTYNNHLYKQISSQSGASNDNHYFGYSTPWGYFDFNRFHCHFSPRDWQRLINNNWGFRPKRLNFKLFNIQVKEVTQNDGTTTIANNLTSTVQVFTDSEYQLPYVLGSAHQGCLPPFPADVFMVPQYGYLTLNNGSQAVGRSSFYCLEYFPSQMLRTGNNFTFSYTFEDVPFHSSYAHSQSLDRLMNPLIDQYLYYLNRTQSNSGTLQQSRLLFSQAGPTSMSLQAKNWLPGPCYRQQRLSKQANDNNNSNFPWTAATKYHLNGRDSLVNPGPAMASHKDDEEKFFPMHGTLIFGKQGTNANDADLEHVMITDEEEIRTTNPVATEQYGNVSNNLQNSNTGPTTENVNHQGALPGMVWQDRDVYLQGPIWAKIPHTDGHFHPSPLMGGFGLKHPPPQIMIKNTPVPANPPTNFSAAKFASFITQYSTGQVSVEIEWELQKENSKRWNPEIQYTSNYNKSVNVDFTVDTNGVYSEPRPIGTRYLTRNL

SEQ ID NO: 4135 - protein, 735 aa, Artificial Sequence
  Description of Artificial Sequence: Synthetic polypeptide
MAADGYLPDWLEDTLSEGIRQWWKLKPGPPPPKPAERHQDDSRGLVLPGYKYLGPFNGLDKGEPVNEADAAALEHDKAYDRQLDSGDNPYLKYNHADAEFQERLKEDTSFGGNLGRAVFQAKKRVLEPLGLVEEPVKTAPGKKRPVEHSPAEPDSSSGTGKAGQQPARKRLNFGQTGDADSVPDPQPLGQPPAAPTSLGSTTMATGSGAPMADNNEGADGVGNSSGNWHCDSQWLGDRVITTSTRTWALPTYNNHLYKQISSQSGASNDNHYFGYSTPWGYFDFNRFHCHFSPRDWQRLINNNWGFRPKRLNFKLFNIQVKEVTQNDGTTTIANNLTSTVQVFTDSEYQLPYVLGSAHQGCLPPFPADVFMVPQYGYLTLNNGSQAVGRSSFYCLEYFPSQMLRTGNNFTFSYTFEDVPFHSSYAHSQSLDRLMNPLIDQYLYYLNRTQSNSGTLQQSRLLFSQAGPTSMSLQAKNWLPGPCYRQQRLSKQANDNNNSNFPWTAATKYHLNGRDSLVNPGPAMASHKDDEEKFFPMHGTLIFGKQGTNANDADLEHVMITDEEEIRTTNPVATEQYGNVSNNLQNSNTGPTTENVNHQGALPGMVWQDRDVYLQGPIWAKIPHTDGHFHPSPLMGGFGLKHPPPQIMIKNTPVPANPPTNFSAAKFASFITQYSTGQVSVEIERELQKENSKRWNPEIQYTSNYNKSVNVDFTVDTNGVYSEPRPIGTRYLTRNL

SEQ ID NO: 4136 - protein, 735 aa, Artificial Sequence
  Description of Artificial Sequence: Synthetic polypeptide
MAADGYLPDWLEDTLSEGIRQWWKLKPGPPPPKPAERHQDDSRGLVLPGYKYLGPFNGLDKGEPVNEADAAALEHDKAYDRQLDSGDNPYLKYNHADAEFQERLKEDTSFGGNLGRAVFQAKKRVLEPLGLVEEPVKTAPGKKRPVEHSPAEPDSSSGTGKAGQQPARKRLNFGQTGDADSVPDPQPLGQPPAAPTSLGSTTMATGSGAPMADNNEGADGVGNSSGNWHCDSQWLGDRVITTSTRTWALPTYNNHLYKQISSQSGASNDNHYFGYSTPWGYFDFNRFHCHFSPRDWQRLINNNWGFRPKRLNFKLFNIQVKEVTQNDGTTTIANNLTSTVQVFTDSEYQLPYVLGSAHQGCLPPFPADVFMVPQYGYLTLNNGSQAVGRSSFYCLEYFPSQMLRTGNNFTFSYTFEDVPFHSSYAHSQSLDRLMNPLIDQYLYYLNRTQSNSGTLQQSRLLFSQAGPTSMSLQAKNWLPGPCYRQQRLSKQANDNNNSNFPWTAATKYHLNGRDSLVNPGPAMASHKDDEEKFFPMHGTLIFGKQGTNANDADLEHVMITDEEEIRTTNPVATEQYGNVSNNLQNSNTGPTTENVNHQGALPGMVWQDRDVYLQGPIWAKIPHTDGHFHPSPLMGGFGLKHPPPQIMIKNTPVPANPPTNFSAAKFASFITQYSTGQVSVEIEWELQKENSKRWNPEIQYTSNYNKSVNVDLTVDTNGVYSEPRPIGTRYLTRNL

SEQ ID NO: 4137 - protein, 735 aa, Artificial Sequence
  Description of Artificial Sequence: Synthetic polypeptide
MAADGYLPDWLEDTLSEGIRQWWKLKPGPPPPKPAERHKDDSRGLVLPGYKYLGPFNGLDKGEPVNEADAAALEHDKAYDRQLDSGDNPYLKYNHADAEFQERLKEDTSFGGNLGRAVFQAKKRVLEPLGLVEEPVKTAPGKKRPVEHSPVEPDSSSGTGKAGQQPARKRLNFGQTGDADSVPDPQPLGQPPAAPTSLGSTTMATGSGAPMADNNEGADGVGNSSGNWHCDSQWLGDRVITTSTRTWALPTYNNHLYKQISSQSGASNDNHYFGHSTPWGYFDFNRFHCHFSPRDWQRLINNNWGFRPKRLNFKLFNIQVKEVTQNDGTTTIANNLTSTVQVFTDSEYQLPYVLGSAHQGCLPPFPADVFMVPQYGYLTLNNGSQAVGRSSFYCLEYFPSQMLRTGNNFTFSYTFEDVPFHSSYAHSQSLDRLMNPLIDQYLYYLNKTQSNSGTLQQSRLLFSQAGPTSMSLQAKNWLPGPCYRQQRLSKQANDNNNSNFPWTAATKYHLNGRDSLVNPGPAMASHKDDEEKFFPMHGTLIFGKQGTNANDADLDNVMITDEEEIRTTNPVATEQYGTVSNNLQNSNTGPTTGTVNHQGALPGMVWQDRDVYLQGPIWAKIPHTDGHFHPSPLMGGFGLKHPPPQIMIKNTPVPANPPTNFSSAKFASFITQYSTGQVSVEIEWELQKENSKRWNPEIQYTSNYNKSVNVDFTVDTNGVYSEPRPIGTRYLTRNL

SEQ ID NO: 4138 - protein, 735 aa, Artificial Sequence
  Description of Artificial Sequence: Synthetic polypeptide
MAADGYLPDWLEDTLSEGIRQWWKLKPGPPPPKPAERHKDDSRGLVLPGYKYLGPFNGLDKGEPVNEADAAALEHDKAYDRQLDSGDNPYLKYNHADAEFQERLKEDTSFGGNLGRAVFQAKKRVLEPLGLVEEPVKTAPGKKRPVEHSPVEPDSSSGTGKAGQQPARKRLNFGQTGDADSVPDPQPLGQPPAAPTSLGSTTMATGSGAPMADNNEGADGVGNSSGNWHCDSQWLGDRVITTSTRTWALPTYNNHLYKQISSQSGAPNDNHYFGHSTPWGYFDFNRFHCHFSPRDWQRLINNNWGFRPKRLNFKLFNIQVKEVTQNDGTTTIANNLTSTVQVFTDSEYQLPYVLGSAHQGCLPPFPADVFMVPQYGYLTLNNGSQAVGRSSFYCLEYFPSQMLRTGNNFTFSYTFEDVPFHSSYAHSQSLDRLMNPLIDQYLYYLNKTQSNSGTLQQSRLLFSQAGPTSMSLQAKNWLPGPCYRQQRLSKQANDNNNSNFPWTAATKYHLNGRDSLVNPGPAMASHKDDEEKFFPMHGTLIFGKQGTNANDADLDNVMITDEEEIRTTNPVATEQYGTVSNNLQNSNTGPTTGTVNHQGALPGMVWQDRDVYLQGPIWAKIPHTDGHFHPSPLMGGFGLKHPPPQIMIKNTPVPANPPTNFSSAKFASFITQYSTGQVSVEIEWELQKENSKRWNPEIQYTSNYNKSVNVDFTVDTNGVYSEPRPIGTRYLTRNL

SEQ ID NO: 4139 - protein, 735 aa, Artificial Sequence
  Description of Artificial Sequence: Synthetic polypeptide
MAADGYLPDWLEDTLSEGIRQWWKLKPGPPPPKPAERHKDDSRGLVLPGYKYLGPFNGLDKGEPVNEADAAALEHDKAYDRQLDSGDNPYLKYNHADAEFQERLKEDTSFGGNLGRAVFQAKKRVLEPLGLVEEPVKTAPGKKRPVEHSPVEPDSSSGTGKAGQQPARKRLNFGQTGDADSVPDPQPLGQPPAAPTSLGSTTMATGSGAPMADNNEGADGVGNSSGNWHCDSQWLGDRVITTSTRTWALPTYNNHLYKQISSQSGASNDNHYFGHSTPWGYFDFNRFHCHFSPRDWQRLINNNWGFRPKRLNFKLFNIQVKEVTQNDGTTTIANNLTSTVQVFTDSEYQLPYVLGSAHQGCLPPFPADVFMVPQYGYLTLNNGSQAVGRSSFYCLEYFPSQMLRTGNNFTFSYTFEDVPFHSSYAHSQSLDRLMNPLIDQYLYYLNKTQSNSGTLQQSRLLFSQAGPTSMSLQAKNWLPGPCYRQQRLSKQANDNNNSNFPWTAATKYHLNGRDSLVNPGPAMASHKDDEEKFFPMHGTLIFGKQGTNANDADLDNVMITDEEEIRTTNPVATEQYGTVSNNLQNSNTGPTTGTVNHQGALPGMVWQDRDVYLQGPIWAKIPHTDGHFHPSPLMGGFGLKHPPPQIMIKNTPVPANPPTNFSSAKFASFITQYSTGQVGVEIEWELQKENSKRWNPEIQYTSNYNKSVNVDFTVDTNGVYSEPRPIGTRYLTRNL

SEQ ID NO: 4140 - protein, 735 aa, Artificial Sequence
  Description of Artificial Sequence: Synthetic polypeptide
MAADGYLPDWLEDTLSEGIRQWWKLKPGPPPPKPAERHKDDSRGLVLPGYKYLGPFNGLDKGEPVNEADAAALEHDKAYDRQLDSGDNPYLKYNHADAEFQERLKEDTSFGGNLGRAVFQAKKRVLEPLGLVEEPVKTAPGKKRPVEHSPVEPDSSSGTGKAGQQPARKRLNFGQTGDADSVPDPQPLGQPPAAPTSLGSTTMATGSGAPMADNNEGADGVGNSSGNWHCDSQWLGDRVITTSTRTWALPTYNNHLYKQISSQSGASNDNHYFGHSTPWGYFDFNRFHCHFSPRDWQRLINNNWGFRPKRLNFKLFNIQVKEVTQNDGTTTIANNLTSTVQVFTDSEYQLPYVLGSAHQGCLPPFPADVFMVPQYGYLTLNNGSQAVGRSSFYCLEYFPSQMLRTGNNFTFSYTFEDVPFHSSYAHSQSLDRLMNPLIDQYLYYLNKTNNQSGTFTQSRLLFSQAGPTSILFKSKNWLPGPCYRQQRLSKRANDNNNSNFPWTAATKYHLNGRDSLVNPGPAMASHKDDEEKFFPQHGTLIFGKQGTKLTDADLDNVMITDEEEIRTTNPVATEQYGTVSNNLQKLNILATTGTVNTQGALPGMVWQDRDVYLQGPIWAKIPHTDGHFHPSPLMGGFGLKHPPPQIMIKNTPVPANPPTNFSSAKFASFITQYSTGQVSVEIEWELQKENSKRWNPEIQYTSNYNKSVNVDFTVDTNGVYSEPRPIGTRYLTRNL

SEQ ID NO: 4141 - protein, 735 aa, Artificial Sequence
  Description of Artificial Sequence: Synthetic polypeptide
MAADGYLPDWLEDTLSEGIRQWWKLKPGPPPPKPAERHKDASRGLVLPGYKYLGPFNGLDKGEPVNEADAAALEHDKAYDRQLDSGDNPYLKYNHADAEFQERLKEDTSFGGNLGRAVFQAKKRVLEPLGLVEEPVKTAPGKKRPVEHSPVEPDSSSGTGKAGQQPARKRLNFGQTGDADSVPDPQPLGQPPAAPTSLGSTTMATGSGAPMADNNEGADGVGNSSGNWHCDSQWLGDRVITTSTRTWALPTYNNHLYKQISSQSGASNDNHYFGYSTPWGYFDFNRFHCHFSPRDWQRLINNNWGFRPKRLNFKLFNIQVKEVTQNDGTTTIANNLTSTVQVFTDSEYQLPYVLGSAHQGCLPPFPADVFMVPQYGYLTLNNGSQAVGRSSFYCLEYFPSQMLRTGNNFTFSYTFEDVPFHSSYAHSQSLDRLMNPLIDQYLYYLNKTNNQSGTFTQSRLLFSQAGPTSILFKSKNWLPGPCYRQQRLSKTANDNNNSNFPWTAATKYHLNGRDSLVNPGPAMASHKDDEEKFFPQHGTLIFGKQGTKLTDADLDNVMITDEEEIRTTNPVATEQYGTVSNNLQKLNILATTGTVNTQGALPGMVWQDRDVYLQGPIWAKIPHTDGHFHPSPLMGGFGLKHPPPQIMIKNTPVPANPPTNFSSAKFASFITQYSTGQVSVEIEWELQKENSKRWNPEIQYTSNYNKSVNVDFTVDTNGVYSEPRPIGTRYLTRNL

SEQ ID NO: 4142 - protein, 735 aa, Artificial Sequence
  Description of Artificial Sequence: Synthetic polypeptide
MAADGYLPDWLEDTLSEGIRQWWKLKPGPPPPKPAERHKDDSRGLVLPGYKYLGPFNGLDKGEPVNEADAAALEHDKAYDRQLDSGDNPYLKYNHADAEFQERLKEDTSFGGNLGRAVFQAKKRVLEPLGLVEEPVKTAPGKKRPVEHSPVEPDSSSGTGKAGQQPARKRLNFGQTGDADSVPDPQPLGQPPAAPTSLGSTTMATGSGAPMADNNEGADGVGNSSGNWHCDSQWLGDRVITTSTRTWALPTYNNHLYKQISSQSGASNDNHYFGHSTPWGYFDFNRFHCHFSPRDWQRLINNNWGFRPKRLNFKLFNIQVKEVTQNDGTTTIANNLTSTVQVFTDSEYQLPYVLGSAHQGCLPPFPADVFMVPQYGYLTLNNGSQAVGRSSFYCLEYFPSQMLRTGNNFTFSYTFEDVPFHSSYAHSQSLDRLMNPLIDQYLYYLNKTNNQSGTFTQSRLLFSQAGPTSILFKSKNWLPGPCYRQQRLSKTANDNNNSNFPWTAATKYHLNGRDSLVNPGPAMASHKDDEEKFFPQHGTLIFGKQGTKLTDADLDNVMITDEEEIRTTNPVATEQYGTVSNNLQKLNILATTGTVNTQGALPGMVWQDRDVYLQGPIWAKIPHTDGHFHPSPLMGGFGLKHPPPQIMIKNTPVPANPPTNFSSAKFASFITQYSTGQVSVEIEWELQKENSKRWNPEIQYTSNYNKSVNVDFTVDTNGVYSEPRPIGTRYLTRNL

SEQ ID NO: 4143 - protein, 735 aa, Artificial Sequence
  Description of Artificial Sequence: Synthetic polypeptide
MAADGYLPDWLEDTLSEGIRQWWKLKPGPPPPKPAERHQDDSRGLVLPGYKYLGPFNGLDKGEPVNEADAAALEHDKAYDRQLDSGDNPYLKYNHADAEFQERLKEDTSFGGNLGRAVFQAKKRVLEPLGLVEEPVKTAPGKKRPVEHSPAEPDSSSGTGKAGQQPARKRLNFGQTGDADSVPDPQPLGQPPAAPTSLGSTTMATGSGAPMADNNEGADGVGNSSGNWHCDSQWLGDGVITTSTRTWALPTYNNHLYKQISSQSGASNDNHYFGYSTPWGYFDFNRFHCHFSPRDWQRLINNNWGFRPKRLNFKLFNIQVKEVTQNDGTTTIANNLTSTVQVFTDSEYQLPYVLGSAHQGCLPPFPADVFMVPQYGYLTLNNGSQAVGRSSFYCLEYFPSQMLRTGNNFTFSYTFEDVPFHSSYAHSQSLDRLMNPLIDQYLYYLNRTQSNSGTLQQSRLLFSQAGPTSMSLQAKNWLPGPCYRQQRLSKQANDNNNSNFPWTAATKYHLNGRDSLVNPGPAMASHKDDEEKFFPMHGTLIFGKQGTNANDADLEHVMITDEEEIRTTNPVATEQYGNVSNNLQNSNTGPTTENVNHQGALPGMVWQDRDVYLQGPIWAKIPHTDGHFHPSPLMGGFGLKHPPPQIMIKNTPVPANPPTNFSAAKFASFITQYSTGQVSVEIEWELQKENSKRWNPEIQYTSNYNKSVNVDFTVDTNGVYSEPRPIGTRYLTRNL

SEQ ID NO: 4144 - protein, 735 aa, Artificial Sequence
  Description of Artificial Sequence: Synthetic polypeptide
MAADGYLPDWLEDTLSEGIRQWWKLKPGPPPPKPAERHQDDSRGLVLPGYKYLGPFNGLDKGEPVNEADAAALEHDKAYDRQLDSGDNPYLKYNHADAEFQERLKEDTSFGGNLGRAVFQAKKRVLEPLGLVEEPVKTAPGKKRPVEHSPAEPDSSSGTGKAGQQPARKRLNFGQTGDADSVPDPQPLGQPPAAPTSLGSTTMATGSGAPMADNNEGADGVGNSSGNWHCDSQWLGDRVITTSTRTWALPTYNNHLYKQISSQSGASNDNHYFGYSTPWGYFDFNRFHCHFSPRDWQRLINNNWGFRPKRLNFKLFNIQVKEVTQNDGTTTIANNLTSTVQAFTDSEYQLPYVLGSAHQGCLPPFPADVFMVPQYGYLTLNNGSQAVGRSSFYCLEYFPSQMLRTGNNFTFSYTFEDVPFHSSYAHSQSLDRLMNPLIDQYLYYLNRTQSNSGTLQQSRLLFSQAGPTSMSLQAKNWLPGPCYRQQRLSKQANDNNNSNFPWTAATKYHLNGRDSLVNPGPAMASHKDDEEKFFPMHGTLIFGKQGTNANDADLEHVMITDEEEIRTTNPVATEQYGNVSNNLQNSNTGPTTENVNHQGALPGMVWQDRDVYLQGPIWAKIPHTDGHFHPSPLMGGFGLKHPPPQIMIKNTPVPANPPTNFSAAKFASFITQYSTGQVSVEIEWELQKENSKRWNPEIQYTSNYNKSVNVDFTVDTNGVYSEPRPIGTRYLTRNL

SEQ ID NO: 4145 - protein, 735 aa, Artificial Sequence
  Description of Artificial Sequence: Synthetic polypeptide
MAADGYLPDWLEDTLSEGIRQWWKLKPGPPPPKPAERHQDDSRGLVLPGYKYLGPFNGLDKGEPVNEADAAALEHDKAYDRQLDSGDNPYLKYNHADAEFQERLKEDTSFGGNLGRAVFQAKKRVLEPLGLVEEPVKTAPGKKRPVEHSPAEPDSSSGTGKAGQQPARKRLNFGQTGDADSVPDPQPLGQPPAAPTSLGSTTMATGSGAPMADNNEGADGVGNSSGNWHCDSQWLGDRVITTSTRTWALPTYNNHLYKQISSQSGASNDNHYFGYSTPWGYFDFNRFHCHFSPRDWQRLINNNWGFRPKRLNFKLFNIQVKEVTQNDGTTTIANNLTSTVQVFTDSEYQLPYVLGSAHQGCLPPFPADVFMVPQYGYLTLNNGSQAVGRSSFYCLEYFPSQMLRTGNNFTFSYTFEDVPFHSSYAHSQSLDRLMNPLIDQYLYYLNRTQSNSGTLQQSRLLFSQAGPTSMSLQAKNWLPGPCYRQQRLSKQANDNNNSNFPWTAATKYHLNGRDSLVNPGPAMASHKDDEEKFFPMHGTLIFGKQGTNANDADLEHVMITDEEEIRTTNPVATEQYGNVSNNLQNSNTGPTTENVNHQGALPGMVWQDRDVYLQGPIWAKIPHTDGHFHPSPLMGGFGLKHPPPQIMIKNTPVPANPPTNFSAAKFASFITQYSTGQVSVEIEWELQKGNSKRWNPEIQYTSNYNKSVNVDFTVDTNGVYSEPRPIGTRYLTRNL

SEQ ID NO: 4146 - protein, 735 aa, Artificial Sequence
  Description of Artificial Sequence: Synthetic polypeptide
MAADGYLPDWLEDTLSEGIRQWWKLKPGPPPPKPAERHQDDSRGLVLPGYKYLGPFNGLDKGEPVNEADAAALEHDKAYDRQLDSGDNPYLKYNHADAEFQERLKEDTSFGGNLGRAVFQAKKRVLEPLGLVEEPVKTAPGKKRPVEHSPAEPDSSSGTGKAGQQPARKRLNFGQTGDADSVPDPQPLGQPPAAPTSLGSTTMATGSGAPMADNNEGADGVGNSSGNWHCDSQWLGDRVITTSTRTWALPTYNNHLYKQISSQSGASNDNHYFGYSTPWGYFDFNRFHCHFSPRDWQRLINNNWGFRPKRLNFKLFNIQVKEVTQNDGTTTIANNLTSTVQVFTDSEYQLPYVLGSAHQGCLPPFPADVFMVPQYGYLTLNNGSQAVGRSSFYCLEYFPSQMLRTGNNFTFSYTFEDVPFHSSYAHSQSLDRLMNPLIDQYLYYLNRTQSNSGTLQQSRLLFSQAGPTSMSLQAKNWLPGPCYRQQRLSKQANDNNNSNFPWTAATKYHLNGRDSLVNPGPAMASHKDDEEKFFPMHGTLIFGKQGTNANDADLEHVMITDEEEIRTTNPVATEQYGNVSNNLQNSNTGPTTENVNHQGALPGMVWQDRDVYLQGPIWAKIPHTDGHFHPSPLMGGFGLKHPPPQIMIKNTPVPANPPTNFSAAKFASFITQYSTGQVSVEIEWGLQKENSKRWNPEIQYTSNYNKSVNVDFTVDTNGVYSEPRPIGTRYLTRNL

SEQ ID NO: 4147 - protein, 735 aa, Artificial Sequence
  Description of Artificial Sequence: Synthetic polypeptide
MAADGYLPDWLEDTLSEGIRQWWKLKPGPPPPKPAERHQDDSRGLVLPGYKYLGPFNGLDKGEPVNEADAAALEHDKAYDRQLDSGDNPYLKYNHADAEFQERLKEDTSFGGNLGRAVFQAKKRVLEPLGLVEEPVKTAPGKKRPVEHSPAEPDSSSGTGKAGQQPARKRLNFGQTGDADSVPDPQPLGQPPAAPTSLGSTTMATGSGAPMADNNEGADGVGNSSGNWHCDSQWLGDRVITTSTRTWALPTYNNHLYKQISSQSGASNDNHYFGYSTPWGYFDFNRFHCHFSPRDWQRLINNNWGFRPKRLNFKLFNIQVKEVTQNDGTTTIANNLTSTVQVFTDSEYQLPYVLGSAHQGCLPPFPADVFMVPQYGYLTLNNGSQAVGRSSFYCLEYFPSQMLRTGNNFTFSYTFEDVPFHSSYAHSQSLDRLMNPLIDQYLYYLNRTRSNSGTLQQSRLLFSQAGPTSMSLQAKNWLPGPCYRQQRLSKQANDNNNSNFPWTAATKYHLNGRDSLVNPGPAMASHKDDEEKFFPMHGTLIFGKQGTNANDADLEHVMITDEEEIRTTNPVATEQYGNVSNNLQNSNTGPTTENVNHQGALPGMVWQDRDVYLQGPIWAKIPHTDGHFHPSPLMGGFGLKHPPPQIMIKNTPVPANPPTNFSAAKFASFITQYSTGQVSVEIEWELQKENSKRWNPEIQYTSNYNKSVNVDFTVDTNGVYSEPRPIGTRYLTRNL

SEQ ID NO: 4148 - protein, 735 aa, Artificial Sequence
  Description of Artificial Sequence: Synthetic polypeptide
MAADGYLPDWLEDTLSEGIRQWWKLKPGPPPPKPAERHQDDSRGLVLPGYKYLGPFNGLDKGEPVNEADAAALEHDKAYDRQLDSGDNPYLKYNHADAEFQERLKEDTSFGGNLGRAVFQAKKRVLEPLGLVEEPVKTAPGKKRPVEHSPAEPDSSSGTGKAGQQPARKRLNFGQTGDADSVPDPQPLGQPPAAPTSLGSTTMATGSGAPMADNNEGADGVGNSSGNWHCDSQWLGDRVITTSTRTWALPTYNNHLYKQISSQSGASNDNHYFGYSTPWGYFDFNRFHCHFSPRDWQRLINNNWGFRPKRLNFKLFNIQVKEVTQNDGTTTIANNLTSTVQVFTDSEYQLPYVLGSAHQGCLPPFPADVFMVPQYGYLTLNNGSQAVGRSSFYCLEYFPSQMLRTGNNFTFSYTFEDVPFHSSYAHSQSLDRLMNPLIDQYLYYLNRTQSNSGTLQQSRLLFSQAGPTSMSLQAKNWLPGPCYRQQRLSKQANDNNNSNFPWTAATKYHLNGRDSLVNPGPAMASHKDDEEKFFPMHGTLIFGKQGTNANDADLEHVMITDEEEIRTTNPVATEQYGNVSNNLQNSNTGPTTENVNHQGALPGMVWQDRGVYLQGPIWAKIPHTDGHFHPSPLMGGFGLKHPPPQIMIKNTPVPANPPTNFSAAKFASFITQYSTGQVSVEIEWELQKENSKRWNPEIQYTSNYNKSVNVDFTVDTNGVYSEPRPIGTRYLTRNL

SEQ ID NO: 4149 - protein, 735 aa, Artificial Sequence
  Description of Artificial Sequence: Synthetic polypeptide
MAADGYLPDWLEDTLSEGIRQWWKLKPGPPPPKPAERHQDDSRGLVLPGYKYLGPFNGLDKGEPVNEADAAALEHDKAYDRQLDSGDNPYLKYNHADAEFQERLKEDTSFGGNLGRAVFQAKKRVLEPLGLVEEPVKTAPGKKRPVEHSPAEPDSSSGTGKAGQQPARKRLNFGQTGDADSVPDPQPLGQPPAAPTSLGSTTMATGSGAPMADNNEGADGVGNSSGNWHCDSQWLGDRVITTSTRTWALPTYNNHLYKQISSQSGASNDNHYFGYSTPWGYFDFNRFHCHFSPRDWQRLINNNWGFRPKRLNFKLFNIQVKEVTQNGGTTTIANNLTSTVQVFTDSEYQLPYVLGSAHQGCLPPFPADVFMVPQYGYLTLNNGSQAVGRSSFYCLEYFPSQMLRTGNNFTFSYTFEDVPFHSSYAHSQSLDRLMNPLIDQYLYYLNRTQSNSGTLQQSRLLFSQAGPTSMSLQAKNWLPGPCYRQQRLSKQANDNNNSNFPWTAATKYHLNGRDSLVNPGPAMASHKDDEEKFFPMHGTLIFGKQGTNANDADLEHVMITDEEEIRTTNPVATEQYGNVSNNLQNSNTGPTTENVNHQGALPGMVWQDRDVYLQGPIWAKIPHTDGHFHPSPLMGGFGLKHPPPQIMIKNTPVPANPPTNFSAAKFASFITQYSTGQVSVEIEWELQKENSKRWNPEIQYTSNYNKSVNVDFTVDTNGVYSEPRPIGTRYLTRNL

SEQ ID NO: 4150 - protein, 735 aa, Artificial Sequence
  Description of Artificial Sequence: Synthetic polypeptide
MAADGYLPDWLEDTLSEGIRQWWKLKPGPPPPKPAERHQDDSRGLVLPGYKYLGPFNGLDKGEPVNEADAAALEHDKAYDRQLDSGDNPYLKYNHADAEFQERLKEDTSFGGNLGRAVFQAKKRVLEPLGLVEEPVKTAPGKKRPVEHSPAEPDSSSGTGKAGQQPARKRLNFGQTGDADSVPDPQPLGQPPAAPTSLGSTTMATGSGAPMADNNEGADGVGNSSGNWHCDSQWLGDRVITTSTRTWALPTYNNHLYKQISSQSGASNDNHYFGYSTPWGYFDFNRFHCHFSPRDWQRLINNNWGFRPKRLNFKLFNIQVKEVTQNDGTTTIANNLTSTVQVFTDSEYQLPYVLGSAHQGCLPPFPADVFMVPQYGYLTLNNGSQAVGRSSFYCLEYFPSQMLRTGNNFTFSYTFEDVPFHSSYAHSQSLDRLMNPLIDQYLYYLNRTQSNSGTLQQSRLLFSQAGPTSMSLQAKNWLPGPCYRQQRLSKQANDNNNSNFPWTAATKYHLNGRDSLVNPGPAMASHKDDEEKFFPMHGTLIFGKQGTNANDADLEHVMITDEEEIRTTNPVATEQYGNVSNNLQNSNTGPTTENVNHQGALPGMVWQDRDVYLQGPIWAKIPHTDGHFHPSPLMGGFGLKHPPPQIMIKNTPVPANPPTNFSAAKFASFITQYSTGQVSVEIEWELRKENSKRWNPEIQYTSNYNKSVNVDFTVDTNGVYSEPRPIGTRYLTRNL

SEQ ID NO: 4151 - protein, 735 aa, Artificial Sequence
  Description of Artificial Sequence: Synthetic polypeptide
MAADGYLPDWLEDTLSEGIRQWWKLKPGPPPPKPAERHQDDSRGLVLPGYKYLGPFNGLDKGEPVNEADAAALEHDKAYDRQLDSGDNPYLKYNHADAEFQERLKEDTSFGGNLGRAVFQAKRRVLEPLGLVEEPVKTAPGKKRPVEHSPAEPDSSSGTGKAGQQPARKRLNFGQTGDADSVPDPQPLGQPPAAPTSLGSTTMATGSGAPMADNNEGADGVGNSSGNWHCDSQWLGDRVITTSTRTWALPTYNNHLYKQISSQSGASNDNHYFGYSTPWGYFDFNRFHCHFSPRDWQRLINNNWGFRPKRLNFKLFNIQVKEVTQNDGTTTIANNLTSTVQVFTDSEYQLPYVLGSAHQGCLPPFPADVFMVPQYGYLTLNNGSQAVGRSSFYCLEYFPSQMLRTGNNFTFSYTFEDVPFHSSYAHSQSLDRLMNPLIDQYLYYLNRTQSNSGTLQQSRLLFSQAGPTSMSLQAKNWLPGPCYRQQRLSKQANDNNNSNFPWTAATKYHLNGRDSLVNPGPAMASHKDDEEKFFPMHGTLIFGKQGTNANDADLEHVMITDEEEIRTTNPVATEQYGNVSNNLQNSNTGPTTENVNHQGALPGMVWQDRDVYLQGPIWAKIPHTDGHFHPSPLMGGFGLKHPPPQIMIKNTPVPANPPTNFSAAKFASFITQYSTGQVSVEIEWELQKENSKRWNPEIQYTSNYNKSVNVDFTVDTNGVYSEPRPIGTRYLTRNL

SEQ ID NO: 4152 - protein, 735 aa, Artificial Sequence
  Description of Artificial Sequence: Synthetic polypeptide
MAADGYLPDWLEDTLSEGIRQWWKLKPGPPPPKPAERHQDDSRGLVLPGYKYLGPFNGLDKGEPVNEADAAALEHDKAYDRQLDSGDNPYLKYNHADAELQERLKEDTSFGGNLGRAVFQAKKRVLEPLGLVEEPVKTAPGKKRPVEHSPAEPDSSSGTGKAGQQPARKRLNFGQTGDADSVPDPQPLGQPPAAPTSLGSTTMATGSGAPMADNNEGADGVGNSSGNWHCDSQWLGDRVITTSTRTWALPTYNNHLYKQISSQSGASNDNHYFGYSTPWGYFDFNRFHCHFSPRDWQRLINNNWGFRPKRLNFKLFNIQVKEVTQNDGTTTIANNLTSTVQVFTDSEYQLPYVLGSAHQGCLPPFPADVFMVPQYGYLTLNNGSQAVGRSSFYCLEYFPSQMLRTGNNFTFSYTFEDVPFHSSYAHSQSLDRLMNPLIDQYLYYLNRTQSNSGTLQQSRLLFSQAGPTSMSLQAKNWLPGPCYRQQRLSKQANDNNNSNFPWTAATKYHLNGRDSLVNPGPAMASHKDDEEKFFPMHGTLIFGKQGTNANDADLEHVMITDEEEIRTTNPVATEQYGNVSNNLQNSNTGPTTENVNHQGALPGMVWQDRDVYLQGPIWAKIPHTDGHFHPSPLMGGFGLKHPPPQIMIKNTPVPANPPTNFSAAKFASFITQYSTGQVSVEIEWELQKENSKRWNPEIQYTSNYNKSVNVDFTVDTNGVYSEPRPIGTRYLTRNL

SEQ ID NO: 4153 - protein, 735 aa, Artificial Sequence
  Description of Artificial Sequence: Synthetic polypeptide
MAADGYLPDWLEDTLSEGIRQWWKLKPGPPPPKPAERHQDDSRGLVLPGYKYLGPFNGLDKGEPVNEADAAALEHDKAYDRQLDSGDNPYLKYNHADAEFQERLKEDTSFGGNLGRAVFQAKKRVLEPLGLVEEPVKTAPGKKRPVEHSPAEPDSSSGTGKAGQQPARKRLNFGQTGDADSVPDPQPLGQPPAAPTSLGSTTMATGSGAPMADNNEGADGVGNSSGNWHCDSQWLGGRVITTSTRTWALPTYNNHLYKQISSQSGASNDNHYFGYSTPWGYFDFNRFHCHFSPRDWQRLINNNWGFRPKRLNFKLFNIQVKEVTQNDGTTTIANNLTSTVQVFTDSEYQLPYVLGSAHQGCLPPFPADVFMVPQYGYLTLNNGSQAVGRSSFYCLEYFPSQMLRTGNNFTFSYTFEDVPFHSSYAHSQSLDRLMNPLIDQYLYYLNRTQSNSGTLQQSRLLFSQAGPTSMSLQAKNWLPGPCYRQQRLSKQANDNNNSNFPWTAATKYHLNGRDSLVNPGPAMASHKDDEEKFFPMHGTLIFGKQGTNANDADLEHVMITDEEEIRTTNPVATEQYGNVSNNLQNSNTGPTTENVNHQGALPGMVWQDRDVYLQGPIWAKIPHTDGHFHPSPLMGGFGLKHPPPQIMIKNTPVPANPPTNFSAAKFASFITQYSTGQVSVEIEWELQKENSKRWNPEIQYTSNYNKSVNVDFTVDTNGVYSEPRPIGTRYLTRNL

SEQ ID NO: 4154 - protein, 735 aa, Artificial Sequence
  Description of Artificial Sequence: Synthetic polypeptide
MAADGYLPDWLEDTLSEGIRQWWKLKPGPPPPKPAERHQDDSRGLVLPGYKYLGPFNGLDKGEPVNEADAAALEHDKAYDRQLDSGDNPYLKYNHADAEFQERLKEDTSFGGNLGRAVFQAKKRVLEPLGLVEEPVKTAPGKKRPVEHSPAEPDSSSGTGKAGQQPARKRLNFGQTGDADSVPDPQPLGQPPAAPTSLGSTTMATGSGAPMADNNEGADGVGNSSGNWHCDSQWLGDRVITTSTRTWALPTYNNHLYKQISSQSGASNDNHYFGYSTPWGYFDFNRFHCHFSPRDWQRLINNNWGFRPKRLNFKLFNIQVKEVTQNDGTTTIANNLTSTVQVFTDSEYQLPYVLGSAHQGCLPPLPADVFMVPQYGYLTLNNGSQAVGRSSFYCLEYFPSQMLRTGNNFTFSYTFEDVPFHSSYAHSQSLDRLMNPLIDQYLYYLNRTQSNSGTLQQSRLLFSQAGPTSMSLQAKNWLPGPCYRQQRLSKQANDNNNSNFPWTAATKYHLNGRDSLVNPGPAMASHKDDEEKFFPMHGTLIFGKQGTNANDADLEHVMITDEEEIRTTNPVATEQYGNVSNNLQNSNTGPTTENVNHQGALPGMVWQDRDVYLQGPIWAKIPHTDGHFHPSPLMGGFGLKHPPPQIMIKNTPVPANPPTNFSAAKFASFITQYSTGQVSVEIEWELQKENSKRWNPEIQYTSNYNKSVNVDFTVDTNGVYSEPRPIGTRYLTRNL

SEQ ID NO: 4155 - protein, 735 aa, Artificial Sequence
  Description of Artificial Sequence: Synthetic polypeptide
MAADGYLPDWLEDTLSEGIRQWWKLKPGPPPPKPAERHQDDSRGLVLPGYKYLGPFNGLDKGEPVNEADAAALEHDKAYDRQLDSGDNPYLKYNHADAEFQERLKEDTSFGGNLGRAVFQAKKRVLEPLGLVEEPVKTAPGKKRPVEHSPAEPDSSSGTGKAGQQPARKRLNFGQTGDADSVPDPQPLGQPPAAPTSLGSTAMATGSGAPMADNNEGADGVGNSSGNWHCDSQWLGDRVITTSTRTWALPTYNNHLYKQISSQSGASNDNHYFGYSTPWGYFDFNRFHCHFSPRDWQRLINNNWGFRPKRLNFKLFNIQVKEVTQNDGTTTIANNLTSTVQVFTDSEYQLPYVLGSAHQGCLPPFPADVFMVPQYGYLTLNNGSQAVGRSSFYCLEYFPSQMLRTGNNFTFSYTFEDVPFHSSYAHSQSLDRLMNPLIDQYLYYLNRTQSNSGTLQQSRLLFSQAGPTSMSLQAKNWLPGPCYRQQRLSKQANDNNNSNFPWTAATKYHLNGRDSLVNPGPAMASHKDDEEKFFPMHGTLIFGKQGTNANDADLEHVMITDEEEIRTTNPVATEQYGNVSNNLQNSNTGPTTENVNHQGALPGMVWQDRDVYLQGPIWAKIPHTDGHFHPSPLMGGFGLKHPPPQIMIKNTPVPANPPTNFSAAKFASFITQYSTGQVSVEIEWELQKENSKRWNPEIQYTSNYNKSVNVDFTVDTNGVYSEPRPIGTRYLTRNL

SEQ ID NO: 4156 - protein, 735 aa, Artificial Sequence
  Description of Artificial Sequence: Synthetic polypeptide
MAADGYLPDWLEDTLSEGIRQWWKLKPGPPPPKPAERHQDDSRGLVLPGYKYLGPFNGLDKGEPVNEADAAALEHDKAYDRQLDSGDNPYLKYNHADAEFQERLKEDTSFGGNLGRAVFQAKKRVLEPLGLVEEPVKTAPGKKRPVEHSPAEPDSSSGTGKAGQQPARKRLNFGQTGDADSVPDPQPLGQPPAAPTSLGSTTMATGSGAPMADNNEGADGVGNSSGNWHCDSQWLGDRVITTSTRTWALPTYNNHLYKQISSQSGASNDNHYFGYSTPWGYFDFNRFHCHFSPRDWQRLINNNWGFRPKRLNFKLFNIQVKEVTQNDGTTTIANNLTSTVQVFTDSEYQLPYVLGSAHQGCLPPFPADVFMVPQYGYLTLNNGSQAVGRSSFYCLEYFPSQMLRTGNNFTFSYTFEDVPFHSSYAHSQSLDRLMNPLIDQYLYYLNRTQSNSGTLQQSRLLFSQAGPTSMSLQAKNWLPGPCYRQQRLSRQANDNNNSNFPWTAATKYHLNGRDSLVNPGPAMASHKDDEEKFFPMHGTLIFGKQGTNANDADLEHVMITDEEEIRTTNPVATEQYGNVSNNLQNSNTGPTTENVNHQGALPGMVWQDRDVYLQGPIWAKIPHTDGHFHPSPLMGGFGLKHPPPQIMIKNTPVPANPPTNFSAAKFASFITQYSTGQVSVEIEWELQKENSKRWNPEIQYTSNYNKSVNVDFTVDTNGVYSEPRPIGTRYLTRNL

SEQ ID NO: 4157 - protein, 735 aa, Artificial Sequence
  Description of Artificial Sequence: Synthetic polypeptide
MAADGYLPDWLEDTLSEGIRQWWKLKPGPPPPKPAERHQDDSRGLVLPGYKYLGPFNGLDKGEPVNEADAAALEHDKAYDRQLGSGDNPYLKYNHADAEFQERLKEDTSFGGNLGRAVFQAKKRVLEPLGLVEEPVKTAPGKKRPVEHSPAEPDSSSGTGKAGQQPARKRLNFGQTGDADSVPDPQPLGQPPAAPTSLGSTTMATGSGAPMADNNEGADGVGNSSGNWHCDSQWLGDRVITTSTRTWALPTYNNHLYKQISSQSGASNDNHYFGYSTPWGYFDFNRFHCHFSPRDWQRLINNNWGFRPKRLNFKLFNIQVKEVTQNDGTTTIANNLTSTVQVFTDSEYQLPYVLGSAHQGCLPPFPADVFMVPQYGYLTLNNGSQAVGRSSFYCLEYFPSQMLRTGNNFTFSYTFEDVPFHSSYAHSQSLDRLMNPLIDQYLYYLNRTQSNSGTLQQSRLLFSQAGPTSMSLQAKNWLPGPCYRQQRLSKQANDNNNSNFPWTAATKYHLNGRDSLVNPGPAMASHKDDEEKFFPMHGTLIFGKQGTNANDADLEHVMITDEEEIRTTNPVATEQYGNVSNNLQNSNTGPTTENVNHQGALPGMVWQDRDVYLQGPIWAKIPHTDGHFHPSPLMGGFGLKHPPPQIMIKNTPVPANPPTNFSAAKFASFITQYSTGQVSVEIEWELQKENSKRWNPEIQYTSNYNKSVNVDFTVDTNGVYSEPRPIGTRYLTRNL

SEQ ID NO: 4158 - protein, 735 aa, Artificial Sequence
  Description of Artificial Sequence: Synthetic polypeptide
MAADGYLPDWLEDTLSEGIRQWWKLKPGPPPPKPAERHQDDSRGLVLPGYKYLGPFNGLDKGEPVNEADAAALEHDKAYDRQLDSGDNPYLKYNHADAEFQERLKEDTSFGGNLGRAVFQAKKRVLEPLGLVEEPVKTAPGKKRPVEHSPAEPDSSSGTGKAGQQPARKRLNFGQTGDADSVPDPQPLGQPPAAPTSLGSTTMATGSGAPMADNNEGADGVGNSSGNWHCDSQWLGDRVITTSTRTWALPTYNNHLYKQISSQSGASNDNHYFGYSTPWGYFDFNRFHCHFSPRDWQRLINNNWGFRPKRLNFKLFNIQVKEVTQNDGTTTIANNLTSTVQVFTDSEYQLPYVLGSAHQGCLPPFPADVFMVPQYGYLTLNNGSQAVGRSSFYCLEYFPSQMLRTGNNFTFSYTFEDVPFHSSYAHSQSLDRLMNPLIDQYLHYLNRTQSNSGTLQQSRLLFSQAGPTSMSLQAKNWLPGPCYRQQRLSKQANDNNNSNFPWTAATKYHLNGRDSLVNPGPAMASHKDDEEKFFPMHGTLIFGKQGTNANDADLEHVMITDEEEIRTTNPVATEQYGNVSNNLQNSNTGPTTENVNHQGALPGMVWQDRDVYLQGPIWAKIPHTDGHFHPSPLMGGFGLKHPPPQIMIKNTPVPANPPTNFSAAKFASFITQYSTGQVSVEIEWELQKENSKRWNPEIQYTSNYNKSVNVDFTVDTNGVYSEPRPIGTRYLTRNL

SEQ ID NO: 4159 - protein, 735 aa, Artificial Sequence
  Description of Artificial Sequence: Synthetic polypeptide
MAADGYLPDWLEDTLSEGIRQWWKLKPGPPPPKPAERHQDDSRGLVLPGYKYLGPFNGLDKGEPVNEADAAALEHDKAYDRQLDSGDNPYLKYNHADAEFQERLKEDTSFGGNLGRAVFQAKKRVLEPLGLVEEPVKTAPGKKRPVEHPPAEPDSSSGTGKAGQQPARKRLNFGQTGDADSVPDPQPLGQPPAAPTSLGSTTMATGSGAPMADNNEGADGVGNSSGNWHCDSQWLGDRVITTSTRTWALPTYNNHLYKQISSQSGASNDNHYFGYSTPWGYFDFNRFHCHFSPRDWQRLINNNWGFRPKRLNFKLFNIQVKEVTQNDGTTTIANNLTSTVQVFTDSEYQLPYVLGSAHQGCLPPFPADVFMVPQYGYLTLNNGSQAVGRSSFYCLEYFPSQMLRTGNNFTFSYTFEDVPFHSSYAHSQSLDRLMNPLIDQYLYYLNRTQSNSGTLQQSRLLFSQAGPTSMSLQAKNWLPGPCYRQQRLSKQANDNNNSNFPWTAATKYHLNGRDSLVNPGPAMASHKDDEEKFFPMHGTLIFGKQGTNANDADLEHVMITDEEEIRTTNPVATEQYGNVSNNLQNSNTGPTTENVNHQGALPGMVWQDRDVYLQGPIWAKIPHTDGHFHPSPLMGGFGLKHPPPQIMIKNTPVPANPPTNFSAAKFASFITQYSTGQVSVEIEWELQKENSKRWNPEIQYTSNYNKSVNVDFTVDTNGVYSEPRPIGTRYLTRNL

SEQ ID NO: 4160 - protein, 735 aa, Artificial Sequence
  Description of Artificial Sequence: Synthetic polypeptide
MAADGYLPDWLEDTLSEGIRQWWKLKPGPPPPKPAERHQDDSRGLVLPGYKYLGPFNGLDKGEPVNEADAAALEHDKAYDRQLDSGDNPYLKYNHADAEFQERLKEDTSFGGNLGRAVFQAKKRVLEPLGLVEEPVKTAPGKKRPVEHSPAEPDSSSGTGKAGQQPARKRLNFGQTGDADSVPDPQPLGQPPAAPTSLGSTTMATGSGAPMADNNEGADGVGNSSGNWHCDSQWLGDRVITTSTRTWALPTYNNHLYKQISSQSGASNDNHYFGYSTPWGYFDFNRFHCHFSPRDWQRLINNNWGFRPKRLNFKLFNIQVKEVTQNDGTTTIANNLTSTVQVFTDSEYQLPYVLGSAHQGCLPPFPADVFMVPQYGYLTLNNGSQAVGRSSFYCLEYFPSQMLRTGNNFTFSYTFEDVPFHSSYAHSQSLDRLMNPLIDQYLYYLNRTQSNSGTLQQSRLLFSQAGPTSMSLQAKNWLPGPCYRQQRLSKQANDNNNSNFPWTAATKYHLNGRDSLVNPGPAMASHKDDEEKFFPMHGTLIFGKQGTNANDADLEHVMITDEEEIRTTNPVATEQYGNVSNNLQNSNTGPTTENVNHQGALPGMVWQDRDVYLQGPIWAKIPHTDGHFHPSPLMGGFGLKHPPPQIMIKNTPVPANPPTNFSAAKFASFITQYSTGQVSVEIEWELQKENSKRWNPEIQYTSNYNKSVNVDFTADTNGVYSEPRPIGTRYLTRNL

SEQ ID NO: 4161 - protein, 735 aa, Artificial Sequence
  Description of Artificial Sequence: Synthetic polypeptide
MAADGYLPDWLEDTLSEGIRQWWKLKPGPPPPKPAERHQDDSRGLVLPGYKYLGPFNGLDKGEPVNEADAAALEHDKAYDRQLDSGDNPYLKYNHADAEFQERLKEDTSFGGNLGRAVFQAKKRVLEPLGLVEEPVKTAPGKKRPVEHSPAEPDSSSGTGKAGQQPARKRLNFGQTGDADSVPDPQPLGQPPAAPTSLGSTTMATGSGAPMADNNEGADGVGNSSGNWHCDSQWLGDRVITTSTRTWALPTYNNHLYKQISSQSGASNDNHYFGYSTPWGYFDFNRFHCHFSPRDWQRLINNNWGFRPKRLNFKLFNIQVKEVTQNDGTTTIANNLTSTVQVFTDSEYQLPYVLGSAHQGCLPPFPADVFMVPQYGYLTLNNGSQAVGRSSFYCLEYFPSQMLRTGNNFTFSYTFEDVPFHSSYAHSQSLDRLMNPLIDQYLYYLNRTQSNSGTLRQSRLLFSQAGPTSMSLQAKNWLPGPCYRQQRLSKQANDNNNSNFPWTAATKYHLNGRDSLVNPGPAMASHKDDEEKFFPMHGTLIFGKQGTNANDADLEHVMITDEEEIRTTNPVATEQYGNVSNNLQNSNTGPTTENVNHQGALPGMVWQDRDVYLQGPIWAKIPHTDGHFHPSPLMGGFGLKHPPPQIMIKNTPVPANPPTNFSAAKFASFITQYSTGQVSVEIEWELQKENSKRWNPEIQYTSNYNKSVNVDFTVDTNGVYSEPRPIGTRYLTRNL

SEQ ID NO: 4162 - protein, 735 aa, Artificial Sequence
  Description of Artificial Sequence: Synthetic polypeptide
MAADGYLPDWLEDTLSEGIRQWWKLKPGPPPPKPAERHQDDSRGLVLPGYKYLGPFNGLDKGEPVNEADAAALEHDKAYDRQLDSGDNPYLKYNHADAEFQERLKEDTSFGGNLGRAVFQAKKRVLEPLGLVEEPVKTAPGKKRPVEHSPAEPDSSSGTGKAGQQPARKRLNFGQTGDADSVPDPQPLGQPPAAPTSLGSTTMATGSGAPMADNNEGADGVGNSSGNWHCDSQWLGDRVITTSTRTWALPTYNNHLYKQISSQSGASNDNHYFGYSTPWGYFDFNRFHCHFSPRDWQRLINNNWGFRPKRLNFKLFNIQVKEVTQNDGTTTIANNLTSTVQVFTDSEYQLPYVLGSAHQGCLPPFPADVFMVPQYGYLTLNNGSQAVGRSSFYCLEYFPSQMLRTGNNFTFSYTFEDVPFHSSYAHSQSLDRLMNPLIDQYLYYLNRTQSNSGTLQQSRLLFSQAGPTSMSLQAKNWLPGPCYRQQRLSKQANDNNNSNFPWTAATKYHLNGRDSLVNPGPAMASHKDDEEKFFPMHGTLIFGKQGTNANDADLEHVMITDEEEIRTTNPVATEQYGNVSNNLQNSNTGPTTENVNHQGALPGMVWQDRDVYLQGPIWAKIPHTDGHFHPSPLMGGFGLKHPPPQIMIKNTPVPANPPTNFSAAKFASFITQYSTGRVSVEIEWELQKENSKRWNPEIQYTSNYNKSVNVDFTVDTNGVYSEPRPIGTRYLTRNL

SEQ ID NO: 4163 - protein, 735 aa, Artificial Sequence
  Description of Artificial Sequence: Synthetic polypeptide
MAADGYLPDWLEDTLSEGIRQWWKLKPGPPPPKPAERHQDDSRGLVLPGYKYLGPFNGLDKGEPVNEADAAALEHDKAYDRQLDSGDNPYLKYNHADAEFQERLKEDTSFGGNLGRAVFRAKKRVLEPLGLVEEPVKTAPGKKRPVEHSPAEPDSSSGTGKAGQQPARKRLNFGQTGDADSVPDPQPLGQPPAAPTSLGSTTMATGSGAPMADNNEGADGVGNSSGNWHCDSQWLGDRVITTSTRTWALPTYNNHLYKQISSQSGASNDNHYFGYSTPWGYFDFNRFHCHFSPRDWQRLINNNWGFRPKRLNFKLFNIQVKEVTQNDGTTTIANNLTSTVQVFTDSEYQLPYVLGSAHQGCLPPFPADVFMVPQYGYLTLNNGSQAVGRSSFYCLEYFPSQMLRTGNNFTFSYTFEDVPFHSSYAHSQSLDRLMNPLIDQYLYYLNRTQSNSGTLQQSRLLFSQAGPTSMSLQAKNWLPGPCYRQQRLSKQANDNNNSNFPWTAATKYHLNGRDSLVNPGPAMASHKDDEEKFFPMHGTLIFGKQGTNANDADLEHVMITDEEEIRTTNPVATEQYGNVSNNLQNSNTGPTTENVNHQGALPGMVWQDRDVYLQGPIWAKIPHTDGHFHPSPLMGGFGLKHPPPQIMIKNTPVPANPPTNFSAAKFASFITQYSTGQVSVEIEWELQKENSKRWNPEIQYTSNYNKSVNVDFTVDTNGVYSEPRPIGTRYLTRNL

SEQ ID NO: 4164 - protein, 735 aa, Artificial Sequence
  Description of Artificial Sequence: Synthetic polypeptide
MAADGYLPDWLEDTLSEGIRQWWKPKPGPPPPKPAERHQDDSRGLVLPGYKYLGPFNGLDKGEPVNEADAAALEHDKAYDRQLDSGDNPYLKYNHADAEFQERLKEDTSFGGNLGRAVFQAKKRVLEPLGLVEEPVKTAPGKKRPVEHSPAEPDSSSGTGKAGQQPARKRLNFGQTGDADSVPDPQPLGQPPAAPTSLGSTTMATGSGAPMADNNEGADGVGNSSGNWHCDSQWLGDRVITTSTRTWALPTYNNHLYKQISSQSGASNDNHYFGYSTPWGYFDFNRFHCHFSPRDWQRLINNNWGFRPKRLNFKLFNIQVKEVTQNDGTTTIANNLTSTVQVFTDSEYQLPYVLGSAHQGCLPPFPADVFMVPQYGYLTLNNGSQAVGRSSFYCLEYFPSQMLRTGNNFTFSYTFEDVPFHSSYAHSQSLDRLMNPLIDQYLYYLNRTQSNSGTLQQSRLLFSQAGPTSMSLQAKNWLPGPCYRQQRLSKQANDNNNSNFPWTAATKYHLNGRDSLVNPGPAMASHKDDEEKFFPMHGTLIFGKQGTNANDADLEHVMITDEEEIRTTNPVATEQYGNVSNNLQNSNTGPTTENVNHQGALPGMVWQDRDVYLQGPIWAKIPHTDGHFHPSPLMGGFGLKHPPPQIMIKNTPVPANPPTNFSAAKFASFITQYSTGQVSVEIEWELQKENSKRWNPEIQYTSNYNKSVNVDFTVDTNGVYSEPRPIGTRYLTRNL

SEQ ID NO: 4165 - protein, 735 aa, Artificial Sequence
  Description of Artificial Sequence: Synthetic polypeptide
MAADGYLPDWLEDTLSEGIRQWWKLKPGPPPPKPAERHQDDSRGLVLPGYKYLGPFNGLDKGEPVNEADAAALEHDKAYDRQLDSGDNPYLKYNHADAEFQERLKEDTSFGGNLGRAVFQAKKRVLEPLGLVEEPVKTAPGKKRPVEHSPAEPDSSSGTGKAGQQPARKRLNFGQTGDADSVPDPQPLGQPPAAPTSLGSTTMATGSGAPMADNNEGADGVGNSSGNWHCDSQWLGDRVITTSTRTWALPTYNNHLYKQISSQSGASNDNHYFGYSTPWGYFDFNRFHCHFSPRDWQRLINNNWGFRPKRLNFKLFNIQVKEVTQNDGTTTIANNLTSTVQVFTDSEYQLPYVLGSAHQGCLPPFPADVFMVPQYGYLTLNNGSQAVGRSSFYCLEYFPSQMLRTGNNFTFSYTFEDVPFHSSYAHSQSLDRLMNPLIDQYLYYLNRTQSNSGTLQQSRLLFSQAGPTSMSLQAKNWLPGPCYRQQRLSKQANDNNNSNFPWTAATKYHLNGRDSLVNPGPAMASHKDDEEKFFPMHGTLIFGKQGTNANDADLEHVMITDEEEIRTTNPVATEQYGNVSNNLQNSNTGPTTENANHQGALPGMVWQDRDVYLQGPIWAKIPHTDGHFHPSPLMGGFGLKHPPPQIMIKNTPVPANPPTNFSAAKFASFITQYSTGQVSVEIEWELQKENSKRWNPEIQYTSNYNKSVNVDFTVDTNGVYSEPRPIGTRYLTRNL

SEQ ID NO: 4166 - protein, 735 aa, Artificial Sequence
  Description of Artificial Sequence: Synthetic polypeptide
MAADGYLPDWLEDTPSEGIRQWWKLKPGPPPPKPAERHQDDSRGLVLPGYKYLGPFNGLDKGEPVNEADAAALEHDKAYDRQLDSGDNPYLKYNHADAEFQERLKEDTSFGGNLGRAVFQAKKRVLEPLGLVEEPVKTAPGKKRPVEHSPAEPDSSSGTGKAGQQPARKRLNFGQTGDADSVPDPQPLGQPPAAPTSLGSTTMATGSGAPMADNNEGADGVGNSSGNWHCDSQWLGDRVITTSTRTWALPTYNNHLYKQISSQSGASNDNHYFGYSTPWGYFDFNRFHCHFSPRDWQRLINNNWGFRPKRLNFKLFNIQVKEVTQNDGTTTIANNLTSTVQVFTDSEYQLPYVLGSAHQGCLPPFPADVFMVPQYGYLTLNNGSQAVGRSSFYCLEYFPSQMLRTGNNFTFSYTFEDVPFHSSYAHSQSLDRLMNPLIDQYLYYLNRTQSNSGTLQQSRLLFSQAGPTSMSLQAKNWLPGPCYRQQRLSKQANDNNNSNFPWTAATKYHLNGRDSLVNPGPAMASHKDDEEKFFPMHGTLIFGKQGTNANDADLEHVMITDEEEIRTTNPVATEQYGNVSNNLQNSNTGPTTENVNHQGALPGMVWQDRDVYLQGPIWAKIPHTDGHFHPSPLMGGFGLKHPPPQIMIKNTPVPANPPTNFSAAKFASFITQYSTGQVSVEIEWELQKENSKRWNPEIQYTSNYNKSVNVDFTVDTNGVYSEPRPIGTRYLTRNL

SEQ ID NO: 4167 - protein, 735 aa, Artificial Sequence
  Description of Artificial Sequence: Synthetic polypeptide
MAADGYLPDWLEDTLSEGIRQWWKLKPGPPPPKPAERHQDDSRGLVLPGYKYLGPFNGLDKGEPVNEADAAALEHDKAYDRQLDSGDNPYLKYNHADAEFQERLKEDTSFGGNLGRAVFQAKKRVLEPLGLVEEPVKTAPGKKRPVEHSPAEPDSSSGTGKAGQQPARKRLNFGQTGDADSVPDPQPLGQPPAAPTSLGSTTMATGSGAPMADNNEGADGVGNSSGNWHCDSQWLGDRVITTSTRTWALPTYNNHLYKQISSQSGASNDNHYFGYSTPWGYFDFNRFHCHFSPRDWQRLINNNWGFRPKRLNFRLFNIQVKEVTQNDGTTTIANNLTSTVQVFTDSEYQLPYVLGSAHQGCLPPFPADVFMVPQYGYLTLNNGSQAVGRSSFYCLEYFPSQMLRTGNNFTFSYTFEDVPFHSSYAHSQSLDRLMNPLIDQYLYYLNRTQSNSGTLQQSRLLFSQAGPTSMSLQAKNWLPGPCYRQQRLSKQANDNNNSNFPWTAATKYHLNGRDSLVNPGPAMASHKDDEEKFFPMHGTLIFGKQGTNANDADLEHVMITDEEEIRTTNPVATEQYGNVSNNLQNSNTGPTTENVNHQGALPGMVWQDRDVYLQGPIWAKIPHTDGHFHPSPLMGGFGLKHPPPQIMIKNTPVPANPPTNFSAAKFASFITQYSTGQVSVEIEWELQKENSKRWNPEIQYTSNYNKSVNVDFTVDTNGVYSEPRPIGTRYLTRNL

SEQ ID NO: 4168 - protein, 735 aa, Artificial Sequence
  Description of Artificial Sequence: Synthetic polypeptide
MAADGYLPDWLEDTLSEGIRQWWKLKPGPPPPKPAERHQDDSRGLVLPGYKYLGPFNGLDKGEPVNEADAAALEHDKAYDRQLDSGDNPYLKYNHADAEFQERLKEDTSFGGNLGRAVFQAKKRVLEPLGLVEEPVKTAPGKKRPVEHSPAEPDSSSGTGKAGQQPARKRLNFGQAGDADSVPDPQPLGQPPAAPTSLGSTTMATGSGAPMADNNEGADGVGNSSGNWHCDSQWLGDRVITTSTRTWALPTYNNHLYKQISSQSGASNDNHYFGYSTPWGYFDFNRFHCHFSPRDWQRLINNNWGFRPKRLNFKLFNIQVKEVTQNDGTTTIANNLTSTVQVFTDSEYQLPYVLGSAHQGCLPPFPADVFMVPQYGYLTLNNGSQAVGRSSFYCLEYFPSQMLRTGNNFTFSYTFEDVPFHSSYAHSQSLDRLMNPLIDQYLYYLNRTQSNSGTLQQSRLLFSQAGPTSMSLQAKNWLPGPCYRQQRLSKQANDNNNSNFPWTAATKYHLNGRDSLVNPGPAMASHKDDEEKFFPMHGTLIFGKQGTNANDADLEHVMITDEEEIRTTNPVATEQYGNVSNNLQNSNTGPTTENVNHQGALPGMVWQDRDVYLQGPIWAKIPHTDGHFHPSPLMGGFGLKHPPPQIMIKNTPVPANPPTNFSAAKFASFITQYSTGQVSVEIEWELQKENSKRWNPEIQYTSNYNKSVNVDFTVDTNGVYSEPRPIGTRYLTRNL

SEQ ID NO: 4169 - protein, 735 aa, Artificial Sequence
  Description of Artificial Sequence: Synthetic polypeptide
MAADGYLPDWLEDTLSEGIRQWWKLKPGPPPPKPAERHQDDSRGLVLPGYKYLGPFNGLDKGEPVNEADAAALEHDKAYDRQLDSGDNPYLKYNHADAEFQERLKEDTSFGGNLGRAVFQAKKRVLEPLGLVEEPVKTAPGKKRPVEHSPAEPDSSSGTGKAGQQPARKRLNFGQTGDADSVPDPQPLGQPPAAPTSLGSTTVATGSGAPMADNNEGADGVGNSSGNWHCDSQWLGDRVITTSTRTWALPTYNNHLYKQISSQSGASNDNHYFGYSTPWGYFDFNRFHCHFSPRDWQRLINNNWGFRPKRLNFKLFNIQVKEVTQNDGTTTIANNLTSTVQVFTDSEYQLPYVLGSAHQGCLPPFPADVFMVPQYGYLTLNNGSQAVGRSSFYCLEYFPSQMLRTGNNFTFSYTFEDVPFHSSYAHSQSLDRLMNPLIDQYLYYLNRTQSNSGTLQQSRLLFSQAGPTSMSLQAKNWLPGPCYRQQRLSKQANDNNNSNFPWTAATKYHLNGRDSLVNPGPAMASHKDDEEKFFPMHGTLIFGKQGTNANDADLEHVMITDEEEIRTTNPVATEQYGNVSNNLQNSNTGPTTENVNHQGALPGMVWQDRDVYLQGPIWAKIPHTDGHFHPSPLMGGFGLKHPPPQIMIKNTPVPANPPTNFSAAKFASFITQYSTGQVSVEIEWELQKENSKRWNPEIQYTSNYNKSVNVDFTVDTNGVYSEPRPIGTRYLTRNL

SEQ ID NO: 4170 - protein, 735 aa, Artificial Sequence
  Description of Artificial Sequence: Synthetic polypeptide
MAADGYLPDWLEDTLSEGIRQWWKLKPGPPPPKPAERHQDDSRGLVLPGYKYLGPFNGLDKGEPVNEADAAALEHDKAYDRQLDSGDNPYLKYNHADAEFQERLKEDTSFGGNLGRAVFQAKKRVLEPLGLVEEPVKTAPGKKRPVEHSPAEPDSSSGTGKAGQQPARKRLNFGQTGDADSVPDPQPLGQPPAAPTSLGSTTMATGSGAPMADNNEGADGVGNSSGNWHCDSQWLGDRVITTSTRTWALPTYNNHLYKQISSQSGASNDNHYFGYSTPWGYFDFNRFHCHFSPRDWQRLINNNWGFRPKRLNFKLFNIQVKEVTQNDGTTTIANNLTSTVQVFTDSEYQLPYVLGSAHQGCLPPFPADVFMVPQYGYLTLNNGSQAVGRSSFYCLEYFPSQMLRTGNNFTFSYTFEDVPFHSSYAHSQSLDRLMNPLIDQYLYYLNRTQSNSGTLQQSRLLFSQAGPTSMSLQAKNWLPGPCYRQQRLSKQANDNNNSNFPWTAATKYHLNGRDSLVNPGPAMASHKGDEEKFFPMHGTLIFGKQGTNANDADLEHVMITDEEEIRTTNPVATEQYGNVSNNLQNSNTGPTTENVNHQGALPGMVWQDRDVYLQGPIWAKIPHTDGHFHPSPLMGGFGLKHPPPQIMIKNTPVPANPPTNFSAAKFASFITQYSTGQVSVEIEWELQKENSKRWNPEIQYTSNYNKSVNVDFTVDTNGVYSEPRPIGTRYLTRNL

SEQ ID NO: 4171 - protein, 735 aa, Artificial Sequence
  Description of Artificial Sequence: Synthetic polypeptide
MAADGYLPDWLEDTLSEGIRQWWKLKPGPPPPKPAERHQDDSRGLVLPGYKYLGPFNGLDKGEPVNEADAAALEHDKAYDRQLDSGDNPYLKYNHADAEFQERLKEDTSFGGNLGRAVFQAKKRVLEPLGLVEEPVKTAPGKKRPVEHSPAEPDSSSGTGKAGQQPARKGLNFGQTGDADSVPDPQPLGQPPAAPTSLGSTTMATGSGAPMADNNEGADGVGNSSGNWHCDSQWLGDRVITTSTRTWALPTYNNHLYKQISSQSGASNDNHYFGYSTPWGYFDFNRFHCHFSPRDWQRLINNNWGFRPKRLNFKLFNIQVKEVTQNDGTTTIANNLTSTVQVFTDSEYQLPYVLGSAHQGCLPPFPADVFMVPQYGYLTLNNGSQAVGRSSFYCLEYFPSQMLRTGNNFTFSYTFEDVPFHSSYAHSQSLDRLMNPLIDQYLYYLNRTQSNSGTLQQSRLLFSQAGPTSMSLQAKNWLPGPCYRQQRLSKQANDNNNSNFPWTAATKYHLNGRDSLVNPGPAMASHKDDEEKFFPMHGTLIFGKQGTNANDADLEHVMITDEEEIRTTNPVATEQYGNVSNNLQNSNTGPTTENVNHQGALPGMVWQDRDVYLQGPIWAKIPHTDGHFHPSPLMGGFGLKHPPPQIMIKNTPVPANPPTNFSAAKFASFITQYSTGQVSVEIEWELQKENSKRWNPEIQYTSNYNKSVNVDFTVDTNGVYSEPRPIGTRYLTRNL

SEQ ID NO: 4172 - protein, 735 aa, Artificial Sequence
  Description of Artificial Sequence: Synthetic polypeptide
MAADGYLPDWLEDTLSEGIRQWWKLKPGPPPPKPAERHQDDSRGLVLPGYKYLGPFNGLDKGEPVNEADAAALEHDKAYDRQLDSGDNPYLKYNHADAEFQERLKEDTSFGGNLGRAVFQAKKRVLEPLGLVEEPVKTAPGKKRPVEHSPAEPDSSSGTGKAGQQPARKRLNFGQTGDADSVPDPQPLGQPPAAPTSLGSTTMATGSGAPMADNNEGADGVGNSSGNWHCDSQWLGDRVITTSTRTWALPTYNNHLYKQISSQSGASNDNHYFGYSTPWGYFDFNRFHCHFSPRDWQRLINNNWGFRPKRLNFKLFNIQVKEVTQNDGTATIANNLTSTVQVFTDSEYQLPYVLGSAHQGCLPPFPADVFMVPQYGYLTLNNGSQAVGRSSFYCLEYFPSQMLRTGNNFTFSYTFEDVPFHSSYAHSQSLDRLMNPLIDQYLYYLNRTQSNSGTLQQSRLLFSQAGPTSMSLQAKNWLPGPCYRQQRLSKQANDNNNSNFPWTAATKYHLNGRDSLVNPGPAMASHKDDEEKFFPMHGTLIFGKQGTNANDADLEHVMITDEEEIRTTNPVATEQYGNVSNNLQNSNTGPTTENVNHQGALPGMVWQDRDVYLQGPIWAKIPHTDGHFHPSPLMGGFGLKHPPPQIMIKNTPVPANPPTNFSAAKFASFITQYSTGQVSVEIEWELQKENSKRWNPEIQYTSNYNKSVNVDFTVDTNGVYSEPRPIGTRYLTRNL

SEQ ID NO: 4173 - protein, 735 aa, Artificial Sequence
  Description of Artificial Sequence: Synthetic polypeptide
MAADGYLPDWLEDTLSEGIRQWWKLKPGPPPPKPAERHQDDSRGLVLPGYKYLGPFNGLDKGEPVNEADAAALEHDKAYDRQLDSGDNPYLKYNHADAEFQERLKEDTSFGGNLGRAVFQAKKRVLEPLGLVEEPVKTAPGKKRPVEHSPAEPDSSSGTGKAGQQPARRRLNFGQTGDADSVPDPQPLGQPPAAPTSLGSTTMATGSGAPMADNNEGADGVGNSSGNWHCDSQWLGDRVITTSTRTWALPTYNNHLYKQISSQSGASNDNHYFGYSTPWGYFDFNRFHCHFSPRDWQRLINNNWGFRPKRLNFKLFNIQVKEVTQNDGTTTIANNLTSTVQVFTDSEYQLPYVLGSAHQGCLPPFPADVFMVPQYGYLTLNNGSQAVGRSSFYCLEYFPSQMLRTGNNFTFSYTFEDVPFHSSYAHSQSLDRLMNPLIDQYLYYLNRTQSNSGTLQQSRLLFSQAGPTSMSLQAKNWLPGPCYRQQRLSKQANDNNNSNFPWTAATKYHLNGRDSLVNPGPAMASHKDDEEKFFPMHGTLIFGKQGTNANDADLEHVMITDEEEIRTTNPVATEQYGNVSNNLQNSNTGPTTENVNHQGALPGMVWQDRDVYLQGPIWAKIPHTDGHFHPSPLMGGFGLKHPPPQIMIKNTPVPANPPTNFSAAKFASFITQYSTGQVSVEIEWELQKENSKRWNPEIQYTSNYNKSVNVDFTVDTNGVYSEPRPIGTRYLTRNL

SEQ ID NO: 4174 - protein, 735 aa, Artificial Sequence
  Description of Artificial Sequence: Synthetic polypeptide
MAADGYLPDWLEDTLSEGIRQWWKLKPGPPPPKPAERHQDDSRGLVLPGYKYLGPFNGLDKGEPVNEADAAALEHDKAYDRQLDSGDNPYLKYNHADAEFQERLKEDTSFGGNLGRAVFQAKKRVLEPLGLVEEPVKTAPGKKRPVEHSPAEPDSSSGTGKAGQQPARKRLNFGQTGDADSVPDPQPLGQPPAAPTSLGSTTMATGSGAPMADNNEGADGVGNSSGNWHCDSQWLGDRVITTSTRTWALPTYNNHLYKQISSQSGASNDNHYFGYSTPWGYFDFNRFHCHFSPRDWQRLINNNWGFRPKRLNFKLFNIQVKEVTQNDGTTTIANNLTSTVQVFTDSEYQLPYVLGSAHQGCLPPFPADVFMVPQYGYLTLNNGSQAVGRSSFYCLEYFPSQMLRTGNNFTFSYTFEDVPFHSSYAHSQSLDRLMNPLIDQYLYYLNRTQSNSGTLQQSRLLFSQAGPTSMSLQAKNWLPGPCYRQQRLSKQANDNNNSNFPWTAATKYHLNGRDSLVNPGPAMASHKDDEEKFFPMHGTLIFGKQGTNANDADLEHVMITDEEEIRTTNPVATEQYGNVSNNLQNSNTGPTTENVNHQGALPGMVWQDRDVYLQGPIWAKIPHTDGHFHPSPLMGGFGLKHPPPQIMIKNTPVPANPPTNFSAAKFASLITQYSTGQVSVEIEWELQKENSKRWNPEIQYTSNYNKSVNVDFTVDTNGVYSEPRPIGTRYLTRNL

SEQ ID NO: 4175 - protein, 735 aa, Artificial Sequence
  Description of Artificial Sequence: Synthetic polypeptide
MAADGYLPDWLEDTLSEGIRQWWKLKPGPPPPKPAERHQDDSRGLVLPGYKYLGPFNGLDKGEPVNEADAAALEHDKAYDRQLDSGDNPYLKYNHADAEFQERLKEDTSFGGNLGRAVFQAKKRVLEPLGLVEEPVKTAPGKKRPVEHSPAEPDSSSGTGKAGQQPARKRLNFGQTGDADSVPDPQPLGQPPAAPTSLGSTTMATGSGAPMADNNEGADGVGNSSGNWHCDSQWLGDRVITTSTRTWALPTYNNHLYKQISSQSGASNDNHYFGYSTPWGYFDFNRFHCHFSPRDWQRLINNNWGFRPKRLSFKLFNIQVKEVTQNDGTTTIANNLTSTVQVFTDSEYQLPYVLGSAHQGCLPPFPADVFMVPQYGYLTLNNGSQAVGRSSFYCLEYFPSQMLRTGNNFTFSYTFEDVPFHSSYAHSQSLDRLMNPLIDQYLYYLNRTQSNSGTLQQSRLLFSQAGPTSMSLQAKNWLPGPCYRQQRLSKQANDNNNSNFPWTAATKYHLNGRDSLVNPGPAMASHKDDEEKFFPMHGTLIFGKQGTNANDADLEHVMITDEEEIRTTNPVATEQYGNVSNNLQNSNTGPTTENVNHQGALPGMVWQDRDVYLQGPIWAKIPHTDGHFHPSPLMGGFGLKHPPPQIMIKNTPVPANPPTNFSAAKFASFITQYSTGQVSVEIEWELQKENSKRWNPEIQYTSNYNKSVNVDFTVDTNGVYSEPRPIGTRYLTRNL

SEQ ID NO: 4176 - protein, 735 aa, Artificial Sequence
  Description of Artificial Sequence: Synthetic polypeptide
MAADGYLPDWLEDTLSEGIRQWWKLKPGPPPPKPAERHQDDSRGLVLPGYKYLGPFNGLDKGEPVNEADAAALEHDKAYDRQLDSGDNPYLKYNHADAEFQERLKEDTSFGGNLGRAVFQAKKRVLEPLGLVEEPVKTAPGKKRPVEHSPAEPDSSSGTGKAGQQPARKRLNFGQTGDADSVPDPQPLGQPPAAPTSLGSTTMATGSGAPMADNNEGADGVGNSSGNWHCDSQWLGDRVITTSTRTWALPTYNNHLYKQISSQSGASNDNHYFGYSTPWGYFDFNRFHCHFSPRDWQRLINNNWGFRPKRLNFKLFNIQVKEVTQNDGTTTIANNLTSTVQVFTDSEYQLPYVLGSAHQGCLPPFPADVFMVPQYGYLTLNNGSQAVGRSSFYCLEYFPSQMLRTGNNFTFSYTFEDVPFHSSYAHSQSLDRLMNPLIDQYLYYLNRTQSNSGTLQQSRLLFSQAGPTSMSLQAKNWLPGPCYRQQRLSKQANDNNNSNFPWTAATKYHLNGRDSLVNPGPAMASHKDDEEKFFPMHGTLIFGKQGTNANDADLEHVMITDEEEIRTTNPVATGQYGNVSNNLQNSNTGPTTENVNHQGALPGMVWQDRDVYLQGPIWAKIPHTDGHFHPSPLMGGFGLKHPPPQIMIKNTPVPANPPTNFSAAKFASFITQYSTGQVSVEIEWELQKENSKRWNPEIQYTSNYNKSVNVDFTVDTNGVYSEPRPIGTRYLTRNL

SEQ ID NO: 4177 - protein, 735 aa, Artificial Sequence
  Description of Artificial Sequence: Synthetic polypeptide
MAADGYLPDWLEDTLSEGIRQWWKLKPGPPPPKPAERHQDDSRGLVLPGYKYLGPFNGLDKGEPVNEADAAALEHDKAYDRQLDSGDNPYLKYNHADAEFQERLKEDTSFGGNLGRAVFQAKKRVLEPLGLVEEPVKTAPGKKRPVEHSPAEPDSSSGTGKAGQQPARKRLNFGQTGDADSVPDPQPLGQPPAAPTSLGSTTMATGSGAPMADNNEGADGVGNSSGNWHCDSQWLGDRVITTSTRTWALPTYNNHLYKQISSQSGASNDNHYFGYSTPWGYFDFNRFHCHFSPRDWQRLINNNWGFRPKRLNFKLFNIQVKEVTQNDGTTTIANNLTSTVQVFTDSEYQLPYVLGSAHQGCLPPFPADVFMVPQYGYLTLNNGSQAVGRSSFYCLEYFPSQMLRTGNNFTFSYTFEDVPFHSSYAHSQSLDRLMNPLIDQYLYYLNRTQSNSGTLQQSRLLFSQAGPTSMSLQAKNWLPGPCYRQQRLSKQANDNNNSNFPWTAATKYHLNGRDSLVNPGPAMASHKDDEEKFFPMHGTLIFGKQGTNANDADLEHVMITDEEEIRTTNPVATEQYGNVPNNLQNSNTGPTTENVNHQGALPGMVWQDRDVYLQGPIWAKIPHTDGHFHPSPLMGGFGLKHPPPQIMIKNTPVPANPPTNFSAAKFASFITQYSTGQVSVEIEWELQKENSKRWNPEIQYTSNYNKSVNVDFTVDTNGVYSEPRPIGTRYLTRNL

SEQ ID NO: 4178 - protein, 735 aa, Artificial Sequence
  Description of Artificial Sequence: Synthetic polypeptide
MAADGYLPDWLEDTLSEGIRQWWKLKPGPPPPKPAERHQDDSRGLVLPGYKYLGPFNGLDKGEPVNEADAAALEHDKAYDRQLDSGDNPYLKYNHADAEFQERLKEDTSFGGNLGRAVFQAKKRVLEPLGLVEEPVKTAPGKKRPVEHSPAEPDSSSGTGKAGQQPARKRLNFGQTGDADSVPDPQPLGQPPAAPTSLGSTTMATGSGAPMADNNEGADGVGNSSGNWHCDSQWLGDRVITTSTRTWALPTYNNHLYKQISSQSGASNDNHYFGYSTPWGYFDFNRFHCHFSPRDWQRLINNNWGFRPKRLNFKLFNIQVKEVTQNDGTTTIANNLTSTVQVFTDSEYQLPYVLGSAHQGCLPPFPADVFMVPQYGYLTPNNGSQAVGRSSFYCLEYFPSQMLRTGNNFTFSYTFEDVPFHSSYAHSQSLDRLMNPLIDQYLYYLNRTQSNSGTLQQSRLLFSQAGPTSMSLQAKNWLPGPCYRQQRLSKQANDNNNSNFPWTAATKYHLNGRDSLVNPGPAMASHKDDEEKFFPMHGTLIFGKQGTNANDADLEHVMITDEEEIRTTNPVATEQYGNVSNNLQNSNTGPTTENVNHQGALPGMVWQDRDVYLQGPIWAKIPHTDGHFHPSPLMGGFGLKHPPPQIMIKNTPVPANPPTNFSAAKFASFITQYSTGQVSVEIEWELQKENSKRWNPEIQYTSNYNKSVNVDFTVDTNGVYSEPRPIGTRYLTRNL

SEQ ID NO: 4179 - protein, 735 aa, Artificial Sequence
  Description of Artificial Sequence: Synthetic polypeptide
MAADGYLPDWLEDTLSEGIRQWWKLKPGPPPPKPAERHQDDSRGLVLPGYKYLGPFNGLDKGEPVNEADAAALEHDKAYDRQLDSGDNPYLKYNHADAEFQERLKEDTSFGGNLGRAAFQAKKRVLEPLGLVEEPVKTAPGKKRPVEHSPAEPDSSSGTGKAGQQPARKRLNFGQTGDADSVPDPQPLGQPPAAPTSLGSTTMATGSGAPMADNNEGADGVGNSSGNWHCDSQWLGDRVITTSTRTWALPTYNNHLYKQISSQSGASNDNHYFGYSTPWGYFDFNRFHCHFSPRDWQRLINNNWGFRPKRLNFKLFNIQVKEVTQNDGTTTIANNLTSTVQVFTDSEYQLPYVLGSAHQGCLPPFPADVFMVPQYGYLTLNNGSQAVGRSSFYCLEYFPSQMLRTGNNFTFSYTFEDVPFHSSYAHSQSLDRLMNPLIDQYLYYLNRTQSNSGTLQQSRLLFSQAGPTSMSLQAKNWLPGPCYRQQRLSKQANDNNNSNFPWTAATKYHLNGRDSLVNPGPAMASHKDDEEKFFPMHGTLIFGKQGTNANDADLEHVMITDEEEIRTTNPVATEQYGNVSNNLQNSNTGPTTENVNHQGALPGMVWQDRDVYLQGPIWAKIPHTDGHFHPSPLMGGFGLKHPPPQIMIKNTPVPANPPTNFSAAKFASFITQYSTGQVSVEIEWELQKENSKRWNPEIQYTSNYNKSVNVDFTVDTNGVYSEPRPIGTRYLTRNL

SEQ ID NO: 4180 - protein, 735 aa, Artificial Sequence
  Description of Artificial Sequence: Synthetic polypeptide
MAADGYLPDWLEDTLSEGIRQWWKLKPGPPPPKPAERHQDDSRGLVLPGYKYLGPFNGLDKGEPVNEADAAALEHDKAYDRQLDSGDNPYLKYNHADAEFQERLKEDTSFGGNLGRAVFQAKKRVLEPLGLVEEPVKTAPGKKRPVEHSPAEPDSSSGTGKAGQQPARKRLNFGQTGDADSVPDPQPLGQPPAAPTSLGSTTMATGSGAPMADNNEGADGVGNSSGNWHCDSQWLGDRVITTSTRTWALPTYNNHLYKQISSQSGASNDNHYFGYSTPWGYFDFNRFHCHFSPRDWQRLINNNWGFRPKRLNFKLFNIQVKEVTQNDGTTTIANNLTSTVQVFTDSEYQLPYVLGSAHQGCLPPFPADVFMVPQYGYLTLNNGSQAVGRSSFYCLEYFPPQMLRTGNNFTFSYTFEDVPFHSSYAHSQSLDRLMNPLIDQYLYYLNRTQSNSGTLQQSRLLFSQAGPTSMSLQAKNWLPGPCYRQQRLSKQANDNNNSNFPWTAATKYHLNGRDSLVNPGPAMASHKDDEEKFFPMHGTLIFGKQGTNANDADLEHVMITDEEEIRTTNPVATEQYGNVSNNLQNSNTGPTTENVNHQGALPGMVWQDRDVYLQGPIWAKIPHTDGHFHPSPLMGGFGLKHPPPQIMIKNTPVPANPPTNFSAAKFASFITQYSTGQVSVEIEWELQKENSKRWNPEIQYTSNYNKSVNVDFTVDTNGVYSEPRPIGTRYLTRNL

SEQ ID NO: 4181 - protein, 735 aa, Artificial Sequence
  Description of Artificial Sequence: Synthetic polypeptide
MAADGYLPDWLEDTLPEGIRQWWKLKPGPPPPKPAERHQDDSRGLVLPGYKYLGPFNGLDKGEPVNEADAAALEHDKAYDRQLDSGDNPYLKYNHADAEFQERLKEDTSFGGNLGRAVFQAKKRVLEPLGLVEEPVKTAPGKKRPVEHSPAEPDSSSGTGKAGQQPARKRLNFGQTGDADSVPDPQPLGQPPAAPTSLGSTTMATGSGAPMADNNEGADGVGNSSGNWHCDSQWLGDRVITTSTRTWALPTYNNHLYKQISSQSGASNDNHYFGYSTPWGYFDFNRFHCHFSPRDWQRLINNNWGFRPKRLNFKLFNIQVKEVTQNDGTTTIANNLTSTVQVFTDSEYQLPYVLGSAHQGCLPPFPADVFMVPQYGYLTLNNGSQAVGRSSFYCLEYFPSQMLRTGNNFTFSYTFEDVPFHSSYAHSQSLDRLMNPLIDQYLYYLNRTQSNSGTLQQSRLLFSQAGPTSMSLQAKNWLPGPCYRQQRLSKQANDNNNSNFPWTAATKYHLNGRDSLVNPGPAMASHKDDEEKFFPMHGTLIFGKQGTNANDADLEHVMITDEEEIRTTNPVATEQYGNVSNNLQNSNTGPTTENVNHQGALPGMVWQDRDVYLQGPIWAKIPHTDGHFHPSPLMGGFGLKHPPPQIMIKNTPVPANPPTNFSAAKFASFITQYSTGQVSVEIEWELQKENSKRWNPEIQYTSNYNKSVNVDFTVDTNGVYSEPRPIGTRYLTRNL

SEQ ID NO: 4182 - protein, 735 aa, Artificial Sequence
  Description of Artificial Sequence: Synthetic polypeptide
MAADGYLPDWLEDTLSEGIRQWWKLKPGPPPPKPAERHQDDSRGLVLPGYKYLGPFNGLDKGEPVNEADAAALEHDKAYDRQLDSGDNPYLKYNHADAEFQERLKEDTSFGGNLGRAVFQAKKRVLEPLGLVEEPVKTAPGKKRPVEHSPAEPDSSSGTGKAGQQPARKRLNFGQTGDADSVPDPQPLGQPPAAPTSLGSTTMATGSGAPMADNNEGADGVGNSSGNWHCDSQWLGDRVITTSTRTWALPTYNNHLYKQISSQSGASNDNHYFGYSTPWGYFDFNRFHCHFSPRDWQRLINNNWGFRPKRLNFKLFNIQVKEVTQNDGTTTIANNLTSTVQVFTDSEYQLPYVLGSAHQGCLPPFPADVFMVPQYGYLTLNNGSQAVGRSSFYCLEYFPSQMLRTGNNFTFSYTFEDVPFHSSYAHSQSLDRLMNPLIDQYLYYLNRTQSNSGTLQQSRLLFSQAGPTSMSLQAKNWLPGPCYRRQRLSKQANDNNNSNFPWTAATKYHLNGRDSLVNPGPAMASHKDDEEKFFPMHGTLIFGKQGTNANDADLEHVMITDEEEIRTTNPVATEQYGNVSNNLQNSNTGPTTENVNHQGALPGMVWQDRDVYLQGPIWAKIPHTDGHFHPSPLMGGFGLKHPPPQIMIKNTPVPANPPTNFSAAKFASFITQYSTGQVSVEIEWELQKENSKRWNPEIQYTSNYNKSVNVDFTVDTNGVYSEPRPIGTRYLTRNL

SEQ ID NO: 4183 - protein, 735 aa, Artificial Sequence
  Description of Artificial Sequence: Synthetic polypeptide
MAADGYLPDWLEDTLSEGIRQWWKLKPGPPPPKPAERHQDDSRGLVLPGYKYLGPFNGLDKGEPVNEADAAALEHDKAYDRQLDSGDNPYLKYNHADAEFQERLKEDTSFGGNLGRAVFQAKKRVLEPLGLVEEPVKTAPGKKRPVEHSPAEPDSSSGTGKAGQQPARKRLNFGQTGDADSVPDPQPLGQPPAAPTSLGSTTMATGSGAPMADNNEGADGVGNSSGNWHCDSQWLGDRVITTSTRTWALPTYNNHLYKQISSQSGASNDNHYFGYSTPWGYFDFNRFHCHFSPRDWQRLINNNWGFRPKRLNFKLFNIQVKEVTQNDGTTTIANNLTSTVQVFTDSEYQLPYVLGSAHQGCLPPFPADVFMVPQYGYLTLNNGSQAVGRSSFYCLEYLPSQMLRTGNNFTFSYTFEDVPFHSSYAHSQSLDRLMNPLIDQYLYYLNRTQSNSGTLQQSRLLFSQAGPTSMSLQAKNWLPGPCYRQQRLSKQANDNNNSNFPWTAATKYHLNGRDSLVNPGPAMASHKDDEEKFFPMHGTLIFGKQGTNANDADLEHVMITDEEEIRTTNPVATEQYGNVSNNLQNSNTGPTTENVNHQGALPGMVWQDRDVYLQGPIWAKIPHTDGHFHPSPLMGGFGLKHPPPQIMIKNTPVPANPPTNFSAAKFASFITQYSTGQVSVEIEWELQKENSKRWNPEIQYTSNYNKSVNVDFTVDTNGVYSEPRPIGTRYLTRNL

SEQ ID NO: 4184 - protein, 735 aa, Artificial Sequence
  Description of Artificial Sequence: Synthetic polypeptide
MAADGYLPDWLEDTLSEGIRQWWKLKPGPPPPKPAERHQDDSRGLVLPGYKYLGPFNGLDKGEPVNEADAAALEHDKAYDRQLDSGDNPYLKYNHADAEFQERLKEDTSFGGNLGRAVFQAKKRVLEPLGLVEEPVKTAPGKKRPVEHSPAEPDSSSGTGKAGQQPARKRLNFGQTGDADSVPDPQPLGQPPAAPTSLGSTTMATGSGAPMADNNEGADGVGNSSGNWHCDSQWLGDRVITTSTRTWALPTYNNHLYKQISSQSGASNDNHYFGYSTPWGYFDFNRFHCHFSPRDWQRLINNNWGFRPKRLNFKLFNIQVKEVTQNDGTTTIANNLTSTVQVFTDSEYQLPYVLGSAHQGCLPPFPADVFMVPQYGYLTLNNGSQAVGRSSFYCLEYFPSQMLRTGNNFTFSYTFEDVPFHSSYAHSQSLDRLMNPLIDQYLYYLNRTQSNSGTLQQSRLLFSQAGPTSMSLQAKNWLPGPCYRQQRLSKQANDNNNGNFPWTAATKYHLNGRDSLVNPGPAMASHKDDEEKFFPMHGTLIFGKQGTNANDADLEHVMITDEEEIRTTNPVATEQYGNVSNNLQNSNTGPTTENVNHQGALPGMVWQDRDVYLQGPIWAKIPHTDGHFHPSPLMGGFGLKHPPPQIMIKNTPVPANPPTNFSAAKFASFITQYSTGQVSVEIEWELQKENSKRWNPEIQYTSNYNKSVNVDFTVDTNGVYSEPRPIGTRYLTRNL

SEQ ID NO: 4185 - protein, 735 aa, Artificial Sequence
  Description of Artificial Sequence: Synthetic polypeptide
MAADGYLPDWLEDTLSEGIRQWWKLKPGPPPPKPAERHQDDSRGLVLPGYKYLGPFNGLDKGEPVNEADAAALEHDKAYDRQFDSGDNPYLKYNHADAEFQERLKEDTSFGGNLGRAVFQAKKRVLEPLGLVEEPVKTAPGKKRPVEHSPAEPDSSSGTGKAGQQPARKRLNFGQTGDADSVPDPQPLGQPPAAPTSLGSTTMATGSGAPMADNNEGADGVGNSSGNWHCDSQWLGDRVITTSTRTWALPTYNNHLYKQISSQSGASNDNHYFGYSTPWGYFDFNRFHCHFSPRDWQRLINNNWGFRPKRLNFKLFNIQVKEVTQNDGTTTIANNLTSTVQVFTDSEYQLPYVLGSAHQGCLPPFPADVFMVPQYGYLTLNNGSQAVGRSSFYCLEYFPSQMLRTGNNFTFSYTFEDVPFHSSYAHSQSLDRLMNPLIDQYLYYLNRTQSNSGTLQQSRLLFSQAGPTSMSLQAKNWLPGPCYRQQRLSKQANDNNNSNFPWTAATKYHLNGRDSLVNPGPAMASHKDDEEKFFPMHGTLIFGKQGTNANDADLEHVMITDEEEIRTTNPVATEQYGNVSNNLQNSNTGPTTENVNHQGALPGMVWQDRDVYLQGPIWAKIPHTDGHFHPSPLMGGFGLKHPPPQIMIKNTPVPANPPTNFSAAKFASFITQYSTGQVSVEIEWELQKENSKRWNPEIQYTSNYNKSVNVDFTVDTNGVYSEPRPIGTRYLTRNL

SEQ ID NO: 4186 - protein, 735 aa, Artificial Sequence
  Description of Artificial Sequence: Synthetic polypeptide
MAADGYLPDWLEDTLSEGIRQWWKLKPGPPPPKPAERHQDDSRGLVLPGYKYLGPFNGLDKGEPVNEADAAALEHDKAYDRQLDSGDNPYLKYNHADAEFQERLKEDTSFGGNLGRAVFQAKKRVLEPLGLVEEPVKTAPGKKRPVEHSPAEPDSSSGTGKAGQQPARKRLNFGQTGDADSVPDPQPLGQPPAAPTSLGSTTMATGSGAPMADNNEGADGVGNSSGNWHCDSQWLGDRVITTSTRTWALPTYNNHLYKQISSQSGASNDNHYFGYSTPWGYFDFNRFHCHFSPRDRQRLINNNWGFRPKRLNFKLFNIQVKEVTQNDGTTTIANNLTSTVQVFTDSEYQLPYVLGSAHQGCLPPFPADVFMVPQYGYLTLNNGSQAVGRSSFYCLEYFPSQMLRTGNNFTFSYTFEDVPFHSSYAHSQSLDRLMNPLIDQYLYYLNRTQSNSGTLQQSRLLFSQAGPTSMSLQAKNWLPGPCYRQQRLSKQANDNNNSNFPWTAATKYHLNGRDSLVNPGPAMASHKDDEEKFFPMHGTLIFGKQGTNANDADLEHVMITDEEEIRTTNPVATEQYGNVSNNLQNSNTGPTTENVNHQGALPGMVWQDRDVYLQGPIWAKIPHTDGHFHPSPLMGGFGLKHPPPQIMIKNTPVPANPPTNFSAAKFASFITQYSTGQVSVEIEWELQKENSKRWNPEIQYTSNYNKSVNVDFTVDTNGVYSEPRPIGTRYLTRNL

SEQ ID NO: 4187 - protein, 735 aa, Artificial Sequence
  Description of Artificial Sequence: Synthetic polypeptide
MAADGYLPDWLEDTLSEGIRQWWKLKPGPPPPKPAERHQDDSRGLVLPGYKYLGPFNGLDKGEPVNEADAAALEHDKAYDRQLDSGDNPYLKYNHADAEFQERLKEDTSFGGNLGRAVFQAKKRVLEPLGLVEEPVKTAPGKKRPVEHSPAEPDSSSGTGKAGQQPARKRLNFGQTGDADSVPDPQPLGQPPAAPTSLGSTTMATGSGAPMADNNEGADGVGNSSGNWHCDSQWLGDRVITTSTRTWALPAYNNHLYKQISSQSGASNDNHYFGYSTPWGYFDFNRFHCHFSPRDWQRLINNNWGFRPKRLNFKLFNIQVKEVTQNDGTTTIANNLTSTVQVFTDSEYQLPYVLGSAHQGCLPPFPADVFMVPQYGYLTLNNGSQAVGRSSFYCLEYFPSQMLRTGNNFTFSYTFEDVPFHSSYAHSQSLDRLMNPLIDQYLYYLNRTQSNSGTLQQSRLLFSQAGPTSMSLQAKNWLPGPCYRQQRLSKQANDNNNSNFPWTAATKYHLNGRDSLVNPGPAMASHKDDEEKFFPMHGTLIFGKQGTNANDADLEHVMITDEEEIRTTNPVATEQYGNVSNNLQNSNTGPTTENVNHQGALPGMVWQDRDVYLQGPIWAKIPHTDGHFHPSPLMGGFGLKHPPPQIMIKNTPVPANPPTNFSAAKFASFITQYSTGQVSVEIEWELQKENSKRWNPEIQYTSNYNKSVNVDFTVDTNGVYSEPRPIGTRYLTRNL

SEQ ID NO: 4188 - protein, 734 aa, Artificial Sequence
  Description of Artificial Sequence: Synthetic polypeptide
MAADGYLPDWLEDTLSEGIRQWWKLKPGPPPPKPAERHQDDSRGLVLPGYKYLGPFNGLDKGEPVNEADAAALEHDKAYDRQLDSGDNPYLKYNHADAEFQERLKEDTSFGGNLGRAVFQAKKRVLEPLGLVEEPVKTAPGKKRPVEHSPAEPDSSSGTGKAGQQPARKRLNFGQTGDADSVPDPQPLGQPPAAPTSLGSTTMATGSGAPMADNNEGADGVGNSSGNWHCDSQWLGDRVITTSTRTWALPTYNNHLYKQISSQSGASNDNHYFGYSTPWGYFDFNRFHCHFSPRDWQRLINNNWGFRPKRLNFKLFNIQVKEVTQNDGTTTIANNLTSTVQVFTDSEYQLPYVLGSAHQGCLPPFPADAFMVPQYGYLTLNNGSQAVGRSSFYCLEYFPSQMLRTGNNFTFSYTFEDVPFHSSYAHSQSLDRLMNPLIDQYLYYLNRTQSNSGTLQQSRLLFSQAGPTSMSLQAKNWLPGPCYRQQRLSKQANDNNSNFPWTAATKYHLNGRDSLVNPGPAMASHKDDEEKFFPMHGTLIFGKQGTNANDADLEHVMITDEEEIRTTNPVATEQYGNVSNNLQNSNTGPTTENVNHQGALPGMVWQDRDVYLQGPIWAKIPHTDGHFHPSPLMGGFGLKHPPPQIMIKNTPVPANPPTNFSAAKFASFITQYSTGQVSVEIEWELQKENSKRWNPEIQYTSNYNKSVNVDFTVDTNGVYSEPRPIGTRYLTRNL

SEQ ID NO: 4189 - protein, 735 aa, Artificial Sequence
  Description of Artificial Sequence: Synthetic polypeptide
MAADGYLPDWLEDTLSEGIRQWWKLKPGPPPPKPAERHQDDSRGLVLPGYKYLGPFNGLDKGEPVNEADAAALEHDKAYDRQLDSGDNPYLKYNHADAEFQERLKEDTSFGGNLGRAVFQAKKRVLEPLGLVEEPVKTAPGKKRPVEHSPAEPDSSSGTGKAGQQPARKRLNFGQTGDADSVPDPQPLGQPPAAPTSLGSTTMATGSGAPMADNNEGADGVGNSSGNWHCDSQWLGDRVITTSTRTWALPTYNNHLYKQISSQSGASNDNHYFGYSTPWGYFDFNRFHCHFSPRGWQRLINNNWGFRPKRLNFKLFNIQVKEVTQNDGTTTIANNLTSTVQVFTDSEYQLPYVLGSAHQGCLPPFPADVFMVPQYGYLTLNNGSQAVGRSSFYCLEYFPSQMLRTGNNFTFSYTFEDVPFHSSYAHSQSLDRLMNPLIDQYLYYLNRTQSNSGTLQQSRLLFSQAGPTSMSLQAKNWLPGPCYRQQRLSKQANDNNNSNFPWTAATKYHLNGRDSLVNPGPAMASHKDDEEKFFPMHGTLIFGKQGTNANDADLEHVMITDEEEIRTTNPVATEQYGNVSNNLQNSNTGPTTENVNHQGALPGMVWQDRDVYLQGPIWAKIPHTDGHFHPSPLMGGFGLKHPPPQIMIKNTPVPANPPTNFSAAKFASFITQYSTGQVSVEIEWELQKENSKRWNPEIQYTSNYNKSVNVDFTVDTNGVYSEPRPIGTRYLTRNL

SEQ ID NO: 4190 - protein, 735 aa, Artificial Sequence
  Description of Artificial Sequence: Synthetic polypeptide
MAADGYLPDWLEDTLSEGIRQWWKLKPGPPPPKPAERHQDDSRGLVLPGYKYLGPFNGLDKGEPVNEADAAALEHDKAYDRQLDSGDNPYLKYNHADAEFQERLKEDTSFGGNLGRAVFQAKKRVLEPLGLVEEPVKTAPGKKRPVEHSPAEPDSSSGTGKAGQQPARKRLNFGQTGDADSVPDPQPLGQPPAAPTSLGSTTMATGSGAPMADNNEGADGVGNSSGNWHCDSQWLGDRVITTSTRTWALPTYNNHLYKQISSQSGASNDNHYFGYSTPWGYFDFNRFHCHFSPRDWQRLINNNWGFRPKRLNFKLFNIQVKEVTQNDGTTTIANNLTSTVQVFTDSEYQLPYVLGSAHQGCLPPFPADVFMVPQYGYLTLNNGSQAVGRSSFYCLEYFPSQMLRTGNNFTFSYTFEDVPFHSSYAHSQSLDRLMNPLIDQYLYYLNGTQSNSGTLQQSRLLFSQAGPTSMSLQAKNWLPGPCYRQQRLSKQANDNNNSNFPWTAATKYHLNGRDSLVNPGPAMASHKDDEEKFFPMHGTLIFGKQGTNANDADLEHVMITDEEEIRTTNPVATEQYGNVSNNLQNSNTGPTTENVNHQGALPGMVWQDRDVYLQGPIWAKIPHTDGHFHPSPLMGGFGLKHPPPQIMIKNTPVPANPPTNFSAAKFASFITQYSTGQVSVEIEWELQKENSKRWNPEIQYTSNYNKSVNVDFTVDTNGVYSEPRPIGTRYLTRNL

SEQ ID NO: 4191 - protein, 735 aa, Artificial Sequence
  Description of Artificial Sequence: Synthetic polypeptide
MAADGYLPDWLEDTLSEGIRQWWKLKPGPPPPKPAERHQDDSRGLVLPGYKYLGPFNGLDKGEPVNEADAAALEHDKAYDRQLDSGDNPYLKYNHADAEFQERLKEDTSFGGNLGRAVFQAKKRVLEPLGLVEEPVKTAPGKKRPVEHSPAEPDSSSGTGKAGQQPARKRLNFGQTGDADSVPDPQPLGQPPAAPTSLGSTTMATGSGAPMADNNEGADGVGNSSGNWHCDSQWLGDRVITTSTRTWALPTYNNHLYKQISSQSGASNDNHYFGYSTPWGYFDFNRFHCHLSPRDWQRLINNNWGFRPKRLNFKLFNIQVKEVTQNDGTTTIANNLTSTVQVFTDSEYQLPYVLGSAHQGCLPPFPADVFMVPQYGYLTLNNGSQAVGRSSFYCLEYFPSQMLRTGNNFTFSYTFEDVPFHSSYAHSQSLDRLMNPLIDQYLYYLNRTQSNSGTLQQSRLLFSQAGPTSMSLQAKNWLPGPCYRQQRLSKQANDNNNSNFPWTAATKYHLNGRDSLVNPGPAMASHKDDEEKFFPMHGTLIFGKQGTNANDADLEHVMITDEEEIRTTNPVATEQYGNVSNNLQNSNTGPTTENVNHQGALPGMVWQDRDVYLQGPIWAKIPHTDGHFHPSPLMGGFGLKHPPPQIMIKNTPVPANPPTNFSAAKFASFITQYSTGQVSVEIEWELQKENSKRWNPEIQYTSNYNKSVNVDFTVDTNGVYSEPRPIGTRYLTRNL

SEQ ID NO: 4192 - protein, 735 aa, Artificial Sequence
  Description of Artificial Sequence: Synthetic polypeptide
MAADGYLPDWLEDTLSEGIRQWWKLKPGPPPPKPAERHQDDSRGLVLPGYKYLGPFNGLDKGEPVNEADAAALGHDKAYDRQLDSGDNPYLKYNHADAEFQERLKEDTSFGGNLGRAVFQAKKRVLEPLGLVEEPVKTAPGKKRPVEHSPAEPDSSSGTGKAGQQPARKRLNFGQTGDADSVPDPQPLGQPPAAPTSLGSTTMATGSGAPMADNNEGADGVGNSSGNWHCDSQWLGDRVITTSTRTWALPTYNNHLYKQISSQSGASNDDHYFGYSTPWGYFDFNRFHCHFSPRDWQRLINNNWGFRPKRLNFKLFNIQVKEVTQNDGTTTIANNLTSTVQVFTDSEYQLPYVLGSAHQGCLPPFPADVFMVPQYGYLTLNNGSQAVGRSSFYCLEYFPSQMLRTGNNFTFSYTFEDVPFHSSYAHSQSLDRLMNPLIDQYLYYLNRTQSNSGTLQQSRLLFSQAGPTSMSLQAKNWLPGPCYRQQRLSKQANDNNNSNFPWTAATKYHLNGRDSLVNPGPAMASHKDDEEKFFPMHGTLIFGKQGTNANDADLEHVMITDEEEIRTTNPVATEQYGNVSNNLQNSNTGPTTENVNHQGALPGMVWQDRDVYLQGPIWAKIPHTDGHFHPSPLMGGFGLKHPPPQIMIKNTPVPANPPTNFSAAKFASFITQYSTGQVSVEIEWELQKENSKRWNPEIQYTSNYNKSVNVDFTVDTNGVYSEPRPIGTRYLTRNL

SEQ ID NO: 4193 - protein, 735 aa, Artificial Sequence
  Description of Artificial Sequence: Synthetic polypeptide
MAADGYLPDWLEDTLSEGIRQWWKLKPGPPPPKPAERHQDDSRGLVLPGYKYLGPFNGLDKGEPVNEADAAALEHDKAYDRQLDSGDNPYLKYNHADAEFQERLKEDTSFGGNLGRAVFQAKKRVLEPLGLVEEPVKTAPGKKRPVEHSPAEPDSSSGTGKAGQQPARKRLNFGQTGDADSVPDPQPLGQPPAAPTSLGSTTMATGSGAPMADNNEGADGVGNSSGNWHCDSQWLGDRVITTSTRTWALPTYNNHLYKQISSQSGASNDNHYFGYSTPWGYFDFNRFHCHFSPRDWQRLINNNWGFRPKRLNFKLFNIQVKEVTQNDGTTTIANNLTSTVQVFTDSEYQLPYVLGSAHQGCLPPFPADVFMVPQYGYLTLNNGSQAVGRSSFYCLEYFPSQMLRTGNNFTFSYTFEDVPFHSSYAHSQSLDRLMNPLIDQYLYYLNRTQSNSGTLQQSRLLFSQAGPTSMSLQAKNWLPGPCYRQQRLSKQANDNNNSNFPWTAATKYHLNGRDSLVNPGPAMASHKDDEEKFFPMHGTLIFGKQGTNANDADLEHVMITDEEEIRTTNPVATEQYGNVSNNLQNSNTGPTTENVNHQGALPGMVWQDRDVYLQGPIWAKIPHTDGHFRPSPLMGGFGLKHPPPQIMIKNTPVPANPPTNFSAAKFASFITQYSTGQVSVEIEWELQKENSKRWNPEIQYTSNYNKSVNVDFTVDTNGVYSEPRPIGTRYLTRNL

SEQ ID NO: 4194 - protein, 735 aa, Artificial Sequence
  Description of Artificial Sequence: Synthetic polypeptide
MAADGYLPDWLEDTLSEGIRQWWKLKPGPPPPKPAERHQDDSRGLVLPGYKYLGPFNGLDKGEPVNEADAAALEHDKAYDRQLDSGDNPYLKYNHADAEFQERLKEDTSFGGNLGRAVFQAKKRVLEPLGLVEEPVKTAPGKKRPVEHSPAEPDSSSGTGKAGQQPARKRLNFGQTGDADSVPDPQPLGQPPAAPTSLGSTTMATGSGAPMADNNEGADGVGNSSGNWHCDSQWLGDRVITTSTRTWALPTYNNHLYKQISSQSGASNDNHYFGYSTPWGYFDFNRFHCHFSPRDWQRLINNNWGFRPKRLNFKLFNIQVKEVTQNDGTTTIANNLTSTVQVFTDSEYQLPYVLGSAHQGCLPPFPADVFMVPQYGYLTLNNGSQAVGRSSFYCLEYFPSQMLRTGNNFTFSYTFEDVPFHSSYAHSQSLDRLMNPLIDQYLYYLNRTQSNSGTLQQSRLLFSQAGPTSMSLQAKNWLPGPCYRQQRLSKQANDNNNSNFPWTAATKYHLNGRDSLVNPGPAMASHKDDEEKFFPMHGTLIFGKQGTNANDADLEHVMITDEEEIRTTNPVATEQYGNVSNNLQNSNTGPTTENVNHQGALPGMVWQDRDVYLQGPIWAKIPHTDGHFHPSPLMGGFGLKHPPPQIMIKNTPVPANPPTNFSAAKSASFITQYSTGQVSVEIEWELQKENSKRWNPEIQYTSNYNKSVNVDFTVDTNGVYSEPRPIGTRYLTRNL

SEQ ID NO: 4195 - protein, 735 aa, Artificial Sequence
  Description of Artificial Sequence: Synthetic polypeptide
MAADGYLPDWLEDTLSEGIRQWWKLKPGPPPPKPAERHQDDSRGLVLPGYKYLGPFNGLDKGEPVNEADAAALEHDKAYDRQLDSGDNPYLKYNHADAEFQERLKEDTSFGGNLGRAVFQAKKRVLEPLGLVEEPVKTAPGKKRPVEHSPAEPDSSSGTGKAGQQPARKRLNFGQTGDADSVPDPQPLGQPPAAPTSLGSTTMATGSGAPMADNNEGADGVGNSSGNWHCDSQWLGDRVITTSTRTWALPTYNNHLYKQISSQSGASNDNHYFGYSTPWGYFDFNRFHCHFSPRDWQRLINNNWGFRPKRLNFKLFNIQVKGVTQNDGTTTIANNLTSTVQVFTDSEYQLPYVLGSAHQGCLPPFPADVFMVPQYGYLTLNNGSQAVGRSSFYCLEYFPSQMLRTGNNFTFSYTFEDVPFHSSYAHSQSLDRLMNPLIDQYLYYLNRTQSNSGTLQQSRLLFSQAGPTSMSLQAKNWLPGPCYRQQRLSKQANDNNNSNFPWTAATKYHLNGRDSLVNPGPAMASHKDDEEKFFPMHGTLIFGKQGTNANDADLEHVMITDEEEIRTTNPVATEQYGNVSNNLQNSNTGPTTENVNHQGALPGMVWQDRDVYLQGPIWAKIPHTDGHFHPSPLMGGFGLKHPPPQIMIKNTPVPANPPTNFSAAKFASFITQYSTGQVSVEIEWELQKENSKRWNPEIQYTSNYNKSVNVDFTVDTNGVYSEPRPIGTRYLTRNL

SEQ ID NO: 4196 - protein, 735 aa, Artificial Sequence
  Description of Artificial Sequence: Synthetic polypeptide
MAADGYLPDWLEDTLSEGIRQWWKLKPGPPPPKPAERHQDDSRGLVLPGYKYLGPFNGLDKGEPVNEADAAALEHDKAYDRQLDSGDNPYLKYNHADAEFQERLKEDTSFGGNLGRAVFQAKKRVLEPLGLVEEPVKTAPGKKRPVEHSPAEPDSSSGTGKAGQQPARKRLNFGQTGDADSVPDPQPLGQPPAAPTSLGSTTMATGSGAPMADNNEGADGVGNSSGNWHCDSQWLGDRVITTSTRTWALPTYNNHLYKQISSQSGASNDNHYFGYSTPWGYFDFNRFHCHFSPRDWQRLINNNWGFRPKRLNFKLFNIQVKEVTQNDGTTTIANNLTSTVQVFTDSEYQLPYVLGSAHQGCLPPFPADVFMVPQYGYLTLNNGSQAVGRSSFYCLEYFPSQMLRTGNNFTFSYTFEDVPFHSSYAHSQSLDRLMNPLIDQYLYYLNRTQSNSGTLQQSRLLFSQAGPTSMSLQAKNWLPGPCYRQQRLSKQANDNNNSNFPWTAATKYHLNGRDSLVNPGPAMASHKDDEEKFFPMHGTPIFGKQGTNANDADLEHVMITDEEEIRTTNPVATEQYGNVSNNLQNSNTGPTTENVNHQGALPGMVWQDRDVYLQGPIWAKIPHTDGHFHPSPLMGGFGLKHPPPQIMIKNTPVPANPPTNFSAAKFASFITQYSTGQVSVEIEWELQKENSKRWNPEIQYTSNYNKSVNVDFTVDTNGVYSEPRPIGTRYLTRNL

SEQ ID NO: 4197 - protein, 735 aa, Artificial Sequence
  Description of Artificial Sequence: Synthetic polypeptide
MAADGYLPDWLEDTLSEGIRQWWKLKPGPPPPKPAERHQDDSRGLVLPGYKYLGPFNGLDKGEPVNEADAAALEHDKAYDRQLDSGDNPYLKYNHADAEFQERLKEDTSFGGNLGRAVFQAKKGVLEPLGLVEEPVKTAPGKKRPVEHSPAEPDSSSGTGKAGQQPARKRLNFGQTGDADSVPDPQPLGQPPAAPTSLGSTTMATGSGAPMADNNEGADGVGNSSGNWHCDSQWLGDRVITTSTRTWALPTYNNHLYKQISSQSGASNDNHYFGYSTPWGYFDFNRFHCHFSPRDWQRLINNNWGFRPKRLNFKLFNIQVKEVTQNDGTTTIANNLTSTVQVFTDSEYQLPYVLGSAHQGCLPPFPADVFMVPQYGYLTLNNGSQAVGRSSFYCLEYFPSQMLRTGNNFTFSYTFEDVPFHSSYAHSQSLDRLMNPLIDQYLYYLNRTQSNSGTLQQSRLLFSQAGPTSMSLQAKNWLPGPCYRQQRLSKQANDNNNSNFPWTAATKYHLNGRDSLVNPGPAMASHKDDEEKFFPMHGTLIFGKQGTNANDADLEHVMITDEEEIRTTNPVATEQYGNVSNNLQNSNTGPTTENVNHQGALPGMVWQDRDVYLQGPIWAKIPHTDGHFHPSPLMGGFGLKHPPPQIMIKNTPVPANPPTNFSAAKFASFITQYSTGQVSVEIEWELQKENSKRWNPEIQYTSNYNKSVNVDFTVDTNGVYSEPRPIGTRYLTRNL

SEQ ID NO: 4198 - protein, 735 aa, Artificial Sequence
  Description of Artificial Sequence: Synthetic polypeptide
MAADGYLPDWLEDTLSEGIRQWWKLKPGPPPPKPAERHQDDSRGLVLPGYKYLGPFNGLDKGEPVNEADAAALEHDKAYDRQLDSGDNPYLKYNHADAEFQERLKEDTSFGGNLGRAVFQAKKRVLEPLGLVEEPVKTAPGKKRPVEHSPAEPDSSSGTGKAGQQPARKRLNFGQTGDADSVPDPQPLGQPPAAPTSLGSTTMATGSGAPMADNNEGADGVGNSSGNWHCDSQWLGDRVITTSTRTWALPTYNNHLYKQISSQSGASNDNHYFGYSTPWGYFDFNRFHCHFSPRDWQRLINNNWGFRPKRLNFKLFNIQVKEVTQNDGTTTIANNLTSTVQVFTDSEYQLPYVLGSAHQGCLPPFPADVFMVPQYGYLTLNNGSQAVGRSSFYCLEYFPSQMLRTGNNFTFSYTFEDVPFHSSYAHSQSLDRLMNPLIGQYLYYLNRTQSNSGTLQQSRLLFSQAGPTSMSLQAKNWLPGPCYRQQRLPKQANDNNNSNFPWTAATKYHLNGRDSLVNPGPAMASHKDDEEKFFPMHGTLIFGKQGTNANDADLEHVMITDEEEIRTTNPVATEQYGNVSNNLQNSNTGPTTENVNHQGALPGMVWQDRDVYLQGPIWAKIPHTDGHFHPSPLMGGFGLKHPPPQIMIKNTPVPANPPTNFSAAKFASFITQYSTGQVSVEIEWELQKENSKRWNPEIQYTSNYNKSVNVDFTVDTNGVYSEPRPIGTRYLTRNL

SEQ ID NO: 4199 - protein, 735 aa, Artificial Sequence
  Description of Artificial Sequence: Synthetic polypeptide
MAADGYLPDWLEDTLSEGIRQWWKLKPGPPPPKPAERHQDDSRGLVLPGYKYLGPFNGLDKGEPVNEADAAALEHDKAYDRQLDSGDNPYLKYNHADAEFQERLKEDTSFGGNLGRAVFQAKKRVLEPLGLVEEPVKTAPGKKRPVEHSPAEPDSSSGTGKAGQQPARKRLNFGQTGDADSVPDPQPLGQPPAAPTSLGSTTMATGSGAPMADNNEGADGVGNSSGNWHCDSQWLGDRVITTSTRTWALPTYNNHLYKQISSQSGASNDNHYFGYSTPWGYFDFNRFHCHFSPRDWQRLINNNWGFRPKRLNFKLFNIQVKEVTQNDGTTTIANNLTSTVQVFTDSEYQLPYVLGSAHQGCLPPFPADVFMVPQYGYLTLNNGSQAVGRSSFYCLEYFPSQMLRTGNNFTFSYTFEDVPFHSSYAHSQSLDRLMNPLIDQYLYYLNRTQSNSGTLQQSRLLFSQAGPTSMSLQAKNWLPGPCYRQQRLSKQANDNNNSNFPWTAATKYHLNGRDSLVNPGPAMASHKDDEEKFFPMHGTLIFGKQGTNANDADLEHVMITDEEEIRTTNPVATEQYGNVSNNLQNSNTGPTTENVNHQGALPGMVWQDRDVYLQGPIWAKIPHTDGRFHPSPLMGGFGLKHPPPQIMIKNTPVPANPPTNFSAAKFASFITQYSTGQVSVEIEWELQKENSKRWNPEIQYTSNYNKSVNVDFTVDTNGVYSEPRPIGTRYLTRNL

SEQ ID NO: 4200 - protein, 735 aa, Artificial Sequence
  Description of Artificial Sequence: Synthetic polypeptide
MAADGYLPDWLEDTLSEGIRQWWKLKPGPPPPKPAERHQDDSRGLVLPGYKYLGPFNGLDKGEPVNEADAAALEHDKAYDRQLDSGDNPYLKYNHADAEFQERLKEDTSFGGNLGRAVFQAKKRVLEPLGLVEEPVKTAPGKKRPVEHSPAEPDSSSGTGKAGQQPARKRLNFGQTGDADSVPDPQPLGQPPAAPTSLGSTTMATGSGAPMADNNEGADGVGNSSGNWHCDSQWLGDRVITTSTRTWALPTYNNHLYKQISSQSGASNDNHYFGYSTPWGYFDFNRFHCHFSPRDWQRLINNNWGFRPKRLNFKLFNIQVKEVTQNDGTTTIANNLTSTVQVFTDSEYQLPYVLGSAHQGCLPPFPADVFMVPQYGYLTLNNGSQAVGRSSFYCLEYFPSQMLRTGNNFTFSYTFEDVPFHSSYAHSQSLDRLMNPLIDQYLYYLNRTQSNSGTLQQSRLLFSQAGPTSMSLQAKNWLPGPCYRQQRLSKQANDNNNSNFPWTAATKYHLNGRDSLVNPGPAMASHKDDEEKFFPMHGALIFGKQGTNANDADLEHVMITDEEEIRTTNPVATEQYGNVSNNLQNSNTGPTTENVNHQGALPGMVWQDRDVYLQGPIWAKIPHTDGHFHPSPLMGGFGLKHPPPQIMIKNTPVPANPPTNFSAAKFASFITQYSTGQVSVEIEWELQKENSKRWNPEIQYTSNYNKSVNVDFTVDTNGVYSEPRPIGTRYLTRNL

SEQ ID NO: 4201 - protein, 735 aa, Artificial Sequence
  Description of Artificial Sequence: Synthetic polypeptide
MAADGYLPDWLEDTLSEGIRQWWKLKPGPPPPKPAERHQDDSRGLVLPGYKYLGPFNGLDKGEPVNEADAAALEHDKAYDRQLDSGDNPYLKYNHADAEFQERLKEDTSFGGNLGRAVFQAKKRVLEPLGLVEEPVKTAPGKKRPVEHSPAEPDSSSGTGKAGQQPARKRLNFGQTGDADSVPDPQPLGQPPAAPTSLGSTTMATGSGAPMADNNEGADGVGNSSGNWHCDSQWLGDRVITTSTRTWALPTYNNHLYKQISSQSGASNDNHYFGYSTPWGYFDFNRFHCHFSPRDWQRLINNNWGFRPKRLNFKLFNIQVKEVTQNDGTTTIANNLTSTVQVFTDSEYQLPYVLGSAHQGCLPPFPADVFMVPQYGYLTLNNGSQAVGRSSFYCLEYFPSQMLRTGNNFTFSYTFEDVPFHSSYAHSQSLDRLMNPLIDQYLYYLNRTQSNSGTLQQSRLLFSQAGPTSMSLQAKNWLPGPCYRQQRLSKQANDNNNSNFPWTAATKYHLNGRDSLVNPGPAMASHKDDEEKFFPMHGTLIFGKQGTNANDADLEHAMITDEEEIRTTNPVATEQYGNVSNNLQNSNTGPTTENVNHQGALPGMVWQDRDVYLQGPIWAKIPHTDGHFHPSPLMGGFGLKHPPPQIMIKNTPVPANPPTNFSAAKFASFITQYSTGQVSVEIEWELQKENSKRWNPEIQYTSNYNKSVNVDFTVDTNGVYSEPRPIGTRYLTRNL

SEQ ID NO: 4202 - protein, 735 aa, Artificial Sequence
  Description of Artificial Sequence: Synthetic polypeptide
MAADGYLPDWLEDTLSEGIRQWWKLKPGPPPPKPAERHQDDSRGLVLPGYKYLGPFNGLDKGEPVNEADAAALEHDKAYDRQLDSGDNPYLKYNHADAEFQERLKEDTSFGGNLGRAVFQAKKRVLEPLGLVEEPVKTAPGKKRPVEHSPAEPDSSSGTGKAGQQPARKRLNFGQTGDADSVPDPQPLGQPPAAPTSLGSTTMATGSGAPMADNNEGADGVGNSSGNWHCDSQWLGDRVITTSTRTWALPTYNNHLYKQISSQSGASNDNHYFGYSTPWGYFDFNRFHCHFSPRDWQRLINNNWGFRPKRLNFKLFNIQVKEVTQNDGTTTIANNLTSTVQVFTDSEYQLPYVLGSAHQGCLPPFPADVFMVPQYGYLTLNNGSQAVGRSSFYCLEYFPSQMLRTGNNFTFSYTFEDVPFHSSYAHSQSLDRLMNPLIDQYLYYLNRTQSNSGTLQQSRLLFSQAGPTSMSLQAKNWLPGPCYRQQRLSKQANDNNNSNFPWTAATKYHLNGRDSLVNPGPAMASHKDDEEKFFPMHGTLIFGKQGTNANDADLEHVMITDEEEIRTTNPVATEQYGNVSNNLQNSNTGPTTENVNHQGALPGMVWQDRDVYLQGPIWAKIPHTDGHFHPSPLMGGFGLKHPPPQIMIKNTPVPANPPTNFSAAKFASFITQYSTGQVSVEIEWELQKENSKRWNPEIRYTSNYNKSVNVDFTVDTNGVYSEPRPIGTRYLTRNL

SEQ ID NO: 4203 - protein, 735 aa, Artificial Sequence
  Description of Artificial Sequence: Synthetic polypeptide
MAADGYLPDWLEDTLSEGIRQWWKLKPGPPPPKPAERHQDDSRGLVLPGYKYLGPFNGLDKGEPVNEADAAALEHDKAYDRQLDSGDNPYLKYNHADAEFQERLKEDTSFGGNLGRAVFQAKKRVLEPLGLVEEPVKTAPGKKRPVEHSPAEPDSSSGTGKAGQQPARKRLNFGQTGDADSVPDPQPLGQPPAAPTSLGSTTMATGSGAPMADNNEGADGVGNSSGNWHCDSQWLGDRVITTSTRTWALPTYNNHLYKQISSQSGASNDNHYFGYSTPWGYFDFNRFHCHFSPRDWQRLINNNWGFRPKRLNFKLFNIQVKEVTQNDGTTTIANNLTSTVQVFTDSEYQLPYVLGSAHQGCLPPFPADVFMVPQYGYLTLNNGSQAVGRSSFYCLEYFPSQMLRTGNNFTFSYTFEDVPFHSSYAHSQSLDRLMNPLIDQYLYYLNRTQSNSGTLQQSRLLFSQAGPTSMSLQAKNWLPGPCYRQQRLSKQANDNNNSNFPRTAATKYHLNGRDSLVNPGPAMASHKDDEEKFFPMHGTLIFGKQGTNANDADLEHVMITDEEEIRTTNPVATEQYGNVSNNLQNSNTGPTTENVNHQGALPGMVWQDRDVYLQGPIWAKIPHTDGHFHPSPLMGGFGLKHPPPQIMIKNTPVPANPPTNFSAAKFASFITQYSTGQVSVEIEWELQKENSKRWNPEIQYTSNYNKSVNVDFTVDTNGVYSEPRPIGTRYLTRNL

SEQ ID NO: 4204 - protein, 735 aa, Artificial Sequence
  Description of Artificial Sequence: Synthetic polypeptide
MAADGYLPDWLEDTLSEGIRQWWKLKPGPPPPKPAERHQDDSRGLVLPGYKYLGPFNGLDKGEPVNEADAAALEHDKAYDRQLDSGDNPYLKYNHADAEFQERLKEDTSFGGNLGRAVFQAKKRVLEPLGLVEEPVKTAPGKKRPVEHSPAEPDSSSGTGKAGQQPARKRLNFGQTGDADSVPDPQPLGQPPAAPTSLGSTTMATGSGAPMADNNEGADGVGNSSGNWHCDSQWLGDRVITTSTRTWALPTYNNHLYKQISSQSGASNDNHYFGYSTPWGYFDFNRFHCHFSPRDWQRLINNNWGFRPKRLNFKLFNIQVKEVTQNDGTTTIANNLTSTVQVFTDSEYQLPYVLGSAHQGCLPPFPADVFMVPQYGYLTLNNGSQAVGRSSFYCLEYFPSQMLRTGNNFTFSYTFEDVPFHSSYAHSQSLDRLMNPLIGQYLYYLNRTQSNSGTLQQSRLLFSQAGPTSMSLQAKNWLPGPCYRQQRLSKQANDNNNSNFPWTAATKYHLNGRDSLVNPGPAMASHKDDEEKFFPMHGTLIFGKQGTNANDADLEHVMITDEEEIRTTNPVATEQYGNVSNNLQNSNTGPTTENVNHQGALPGMVWQDRDVYLQGPIWAKIPHTDGHFHPSPLMGGFGLKHPPPQIMIKNTPVPANPPTNFSAAKFASFITQYSTGQVSVEIEWELQKENSKRWNPEIQYTSNYNKSVNVDFTVDTNGVYSEPRPIGTRYLTRNL

SEQ ID NO: 4205 - protein, 735 aa, Artificial Sequence
  Description of Artificial Sequence: Synthetic polypeptide
MAADGYLPDWLEDTLSEGIRQWWKLKPGPPPPKPAERHQDDSRGLVLPGYKYLGPFNGLDKGEPVNEADAAALEHDKAYDRQLDSGDNPYLKYNHADAEFQERLKEDTSFGGNLGRAVFQAKKRVLEPLGLVEEPVKTAPGKKRPVEHSPAEPDSSSGTGKAGQQPARKRLNFGQTGDADSVPDPQPLGQPPAAPTSLGSTTMATGSGAPMADNNEGADGVGNSSGNWHCDSQWLGDRVITTSTRTWALPTYNNHLYKQISSQSGASNDNHYFGYSTPWGYFDFNRFHCHFSPRDWQRLINNNWGFRPKRLNFKLFNIQVKEVTQNDGTTTIANNLTSTVQVFTDSEYQLPYVLGSAHQGCLPPFPADVFMVPQYGYLTLNNGSQAVGRSSFYCLEYFPSQMLRTGNNFTFSYTFEDVPFHSSYAHSQSLDRLMNPLIDQYLYYLNRTQSNSGTLQQSRLLFSQAGPTSMSLQAKNWLPGPCYRQQRLSKQANDNNNSNFPWTAATKYHLNGRDSLVNPGPAMASHKDDEEKFFPMHGTLIFGKQGTNANDADLEHVMITDEEEIRTTNPVATEQYGNVSNNLQNSNTGPTTENVNHQGALPGMVWQDRDVYLQGPIWAKIPHTDGHFHPSPLMGGFGLKHPPPQIMIKNTPVPANPPTNFSAAKFASFITQYSTGQVGVEIEWELQKENSKRWNPEIQYTSNYNKSVNVDFTVDTNGVYSEPRPIGTRYLTRNL

SEQ ID NO: 4206 - protein, 735 aa, Artificial Sequence
  Description of Artificial Sequence: Synthetic polypeptide
MAADGYLPDWLEDTLSEGIRQWWKLKPGPPPPKPAERHQDDSRGLVLPGYKYLGPFNGLDKGEPVNEADAAALEHDKAYDRQLDSGDNPYLKYNHADAEFQERLKEDTSFGGNLGRAVFQAKKRVLEPLGLVEEPVKTAPGKKRPVEHSPAEPDSSSGTGKAGQQPARKRLNFGQTGDADSVPDPQPLGQPPAAPTSLGSTTMATGSGAPMADNNEGADGVGNSSGNWHCDSQWLGDRAITTSTRTWALPTYNNHLYKQISSQSGASNDNHYFGYSTPWGYFDFNRFHCHFSPRDWQRLINNNWGFRPKRLNFKLFNIQVKEVTQNDGTTTIANNLTSTVQVFTDSEYQLPYVLGSAHQGCLPPFPADVFMVPQYGYLTLNNGSQAVGRSSFYCLEYFPSQMLRTGNNFTFSYTFEDVPFHSSYAHSQSLDRLMNPLIDQYLYYLNRTQSNSGTLQQSRLLFSQAGPTSMSLQAKNWLPGPCYRQQRLSKQANDNNNSNFPWTAATKYHLNGRDSLVNPGPAMASHKDDEEKFFPMHGTLIFGKQGTNANDADLEHVMITDEEEIRTTNPVATEQYGNVSNNLQNSNTGPTTENVNHQGALPGMVWQDRDVYLQGPIWAKIPHTDGHFHPSPLMGGFGLKHPPPQIMIKNTPVPANPPTNFSAAKFASFITQYSTGQVSVEIEWELQKENSKRWNPEIQYTSNYNKSVNVDFTVDTNGVYSEPRPIGTRYLTRNL

SEQ ID NO: 4207 - protein, 735 aa, Artificial Sequence
  Description of Artificial Sequence: Synthetic polypeptide
MAADGYLPDWLEDTLSEGIRQWWKLKPGPPPPKPAERHQDDSRGLVLPGYKYLGPFNGLDKGEPVNEADAAALEHDKAYDRQLDSGDNPYLKYNHADAEFQERLKEDTSFGGNLGRAVFQAKKRVLEPLGLVEEPVKTAPGKKRPVEHSPAEPDSSSGTGKAGQQPARKRLNFGQTGDAGSVPDPQPLGQPPAAPTSLGSTTMATGSGAPMADNNEGADGVGNSSGNWHCDSQWLGDRVITTSTRTWALPTYNNHLYKQISSQSGASNDNHYFGYSTPWGYFDFNRFHCHFSPRDWQRLINNNWGFRPKRLNFKLFNIQVKEVTQNDGTTTIANNLTSTVQVFTDSEYQLPYVLGSAHQGCLPPFPADVFMVPQYGYLTLNNGSQAVGRSSFYCLEYFPSQMLRTGNNFTFSYTFEDVPFHSSYAHSQSLDRLMNPLIDQYLYYLNRTQSNSGTLQQSRLLFSQAGPTSMSLQAKNWLPGPCYRQQRLSKQANDNNNSNFPWTAATKYHLNGRDSLVNPGPAMASHKDDEEKFFPMHGTLIFGKQGTNANDADLEHVMITDEEEIRTTNPVATEQYGNVSNNLQNSNTGPTTENVNHQGALPGMVWQDRDVYLQGPIWAKIPHTDGHFHPSPLMGGFGLKHPPPQIMIKNTPVPANPPTNFSAAKFASFITQYSTGQVSVEIEWELQKENSKRWNPEIQYTSNYNKSVNVDFTVDTNGVYSEPRPIGTRYLTRNL

SEQ ID NO: 4208 - protein, 735 aa, Artificial Sequence
  Description of Artificial Sequence: Synthetic polypeptide
MAADGYLPDWLEDTLSEGIRQWWKLKPGPPPPKPAERHQDDSRGLVLPGYKYLGPFNGLDKGEPVNEADAAALEHDKAYDRQLDSGDSPYLKYNHADAEFQERLKEDTSFGGNLGRAVFQAKKRVLEPLGLVEEPVKTAPGKKRPVEHSPAEPDSSSGTGKAGQQPARKRLNFGQTGDADSVPDPQPLGQPPAAPTSLGSTTMATGSGAPMADNNEGADGVGNSSGNWHCDSQWLGDRVITTSTRTWALPTYNNHLYKQISSQSGASNDNHYFGYSTPWGYFDFNRFHCHFSPRDWQRLINNNWGFRPKRLNFKLFNIQVKEVTQNDGTTTIANNLTSTVQVFTDSEYQLPYVLGSAHQGCLPPFPADVFMVPQYGYLTLNNGSQAVGRSSFYCLEYFPSQMLRTGNNFTFSYTFEDVPFHSSYAHSQSLDRLMNPLIDQYLYYLNRTQSNSGTLQQSRLLFSQAGPTSMSLQAKNWLPGPCYRQQRLSKQANDNNNSNFPWTAATKYHLNGRDSLVNPGPAMASHKDDEEKFFPMHGTLIFGKQGTNANDADLEHVMITDEEEIRTTNPVATEQYGNVSNNLQNSNTGPTTENVNHQGALPGMVWQDRDVYLQGPIWAKIPHTDGHFHPSPLMGGFGLKHPPPQIMIKNTPVPANPPTNFSAAKFASFITQYSTGQVSVEIEWELQKENSKRWNPEIQYTSNYNKSVNVDFTVDTNGVYSEPRPIGTRYLTRNL

SEQ ID NO: 4209 - protein, 735 aa, Artificial Sequence
  Description of Artificial Sequence: Synthetic polypeptide
MAADGYLPDWLEDTLSEGIRQWWKLKPGPPPPKPAERHQDDSRGLVLPGYKYLGPFNGLDKGEPVNEADAAALEHDKAYDRQLDSGDNPYLKYNHADAEFQERLKEDTSFGGNLGRAVFQAKKRVLEPLGLVEEPVKTAPGKKRPVEHSPAEPDSSSGTGKAGQQPARKRLNFGQTGDADSVPDPQPLGQPPAAPTSLGSTTMATGSGAPMADNNEGADGVGNSSGNWHCDSQWLGDRVITTSTRTWALPTYNNHLYKQISSQSGASNDNHYFGYSTPWGYFDFNRFHCHFSPRDWQRLINNNWGFRPKRLNFKLFNIQVKEVTQNDGTTTIANNLTSTVQVFTDSEYQLPYVLGSAHQGCLPPFPADVFMVPQYGYLTLNNGSQAVGRSSFYCLEYFPSQMLRTGNNFTFSYTFEDVPFHSSYAHSQSLDRLMNPLIDQYLYYLNRTQSNSGTLQQSRLLFSQAGPTSMSLQAKNWLPGPCYRQQRLSKQANDNNNSNFPWTAATKYHLNGRDSLVNPGPAMASHKDDEEKFFPMHGTLIFGKQGTNANDADLEHVMITDEEEIRTTNPVATEQYGNVSNNLQNSNTGPTTENVNHQGALPGMVWQDRDVYLQGPIWAKIPHTDGHFHPSPLMGGFGLKHPPPQIMIKNTPVPANPPTNFSAAKFASFITQYSTGQVSVEIEWELQKENSKRWNPEIQYTSNYNKSVNVDFTVDTNGVYSEPRPIGTRYLTRNP

SEQ ID NO: 4210 - protein, 735 aa, Artificial Sequence
  Description of Artificial Sequence: Synthetic polypeptide
MAADGYLPDWLEDTLSEGIRQWWKLKPGPPPPKPAERHQDDSRGLVLPGYKYLGPFNGLDKGEPVNEADAAALEHDKAYDRQLDSGDNPYLKYNHADAEFQERLKEDTSFGGNLGRAVFQAKKRVLEPLGLVEEPVKTAPGKKRPVEHSPAEPDSSSGTGKAGQQPARKRLNFGQTGDADSVPDPQPLGQPPAAPTSLGSTTMATGSGAPMADNNEGADGVGNSSGNWHCDSQWLGDRVITTSTRTWALPTYNNHLYKQISSQSGASNDNHYFGYSTPWGYFDFNRFHCHFSPRDWQRLINNNWGFRPKRLNFKLFNIQVKEVTQNDGTTTIANNLTSTVQVFTDSEYQLPYVLGSAHQGCLPPFPADVFMVPQYGYLTLNNGSQAVGRSSFYCLEYFPSQMLRTGNNFTFSYTFEDVPFHSSYAHSQSLDRLMNPLIDQYLYYLNRTQSNSGTLQQSRLLFSQAGPTSMSLQAKNWLPGPCYRQQRPSKQANDNNNSNFPWTAATKYHLNGRDSLVNPGPAMASHKDDEEKFFPMHGTLIFGKQGTNANDADLEHVMITDEEEIRTTNPVATEQYGNVSNNLQNSNTGPTTENVNHQGALPGMVWQDRDVYLQGPIWAKIPHTDGHFHPSPLMGGFGLKHPPPQIMIKNTPVPANPPTNFSAAKFASFITQYSTGQVSVEIEWELQKENSKRWNPEIQYTSNYNKSVNVDFTVDTNGVYSEPRPIGTRYLTRNL

SEQ ID NO: 4211 - protein, 735 aa, Artificial Sequence
  Description of Artificial Sequence: Synthetic polypeptide
MAADGYLPDWLEDTLSEGIRQWWKLKPGPPPPKPAERHQDDSRGLVLPGYKYLGPFNGLDKGEPVNEADAAALEHDKAYDRQLDSGDNPYLKYNHADAEFQERLKEDTSFGGNLGRAVFQAKKRVLEPLGLVEEPVKTAPGKKRPVEHSPAEPDSSSGTGKAGQQPARKRLNFSQTGDADSVPDPQPLGQPPAAPTSLGSTTMATGSGAPMADNNEGADGVGNSSGNWHCDSQWLGDRVITTSTRTWALPTYNNHLYKQISSQSGASNDNHYFGYSTPWGYFDFNRFHCHFSPRDWQRLINNNWGFRPKRLNFKLFNIQVKEVTQNDGTTTIANNLTSTVQVFTDSEYQLPYVLGSAHQGCLPPFPADVFMVPQYGYLTLNNGSQAVGRSSFYCLEYFPSQMLRTGNNFTFSYTFEDVPFHSSYAHSQSLDRLMNPLIDQYLYYLNRTQSNSGTLQQSRLLFSQAGPTSMSLQAKNWLPGPCYRQQRLSKQANDNNNSNFPWTAATKYHLNGRDSLVNPGPAMASHKDDEEKFFPMHGTLIFGKQGTNANDADLEHVMITDEEEIRTTNPVATEQYGNVSNNLQNSNTGPTTENVNHQGALPGMVWQDRDVYLQGPIWAKIPHTDGHFHPSPLMGGFGLKHPPPQIMIKNTPVPANPPTNFSAAKFASFITQYSTGQVSVEIEWELQKENSKRWNPEIQYTSNYNKSVNVDFTVDTNGVYSEPRPIGTRYLTRNL

SEQ ID NO: 4212 - protein, 735 aa, Artificial Sequence
  Description of Artificial Sequence: Synthetic polypeptide
MAADGYLPDWLEDTLSEGIRQWWKLKPGPPPPKPAERHQDDSRGLVLPGYKYLGPFNGLDKGEPVNEADAAALEHDKAYDRQLDSGDNPYLKYNHADAEFQERLKEDTSFGGNLGRAVFQAKKRVLEPLGLVEEPVKTAPGKKRPVEHSPAEPDSSSGTGKAGQQPARKRLNFGQTGDADSVPDPQPLGQPPAAPTSLGSTTMATGSGAPMADNNEGADGVGNSSGNWHCDSQWLGDRVITTSTRTWALPTYNNHLYKQISSQSGASNDNHYFGYSTPWGYFDFNRFHCHFSPRDWQRLINNNWGFRPKRLNFKLFNIQVKEVTQNDGTTTIANNLTSTVQVFTDSEYQLPYVLGSAHQGCLPPFPADVFMVPQYGYLTLNNGSQAVGRSSFYCLEYFPSQMLRTGNNFTFSYTFEDVPFHSSYAHSQSLDRLMNPLIDQYLYYLNRTQSNSGTLQQSRLLFSQAGPTSMSLQAKNWLPGPCYRQQRLSKQANDNNNSNFPWTAATKYHLNGRDSLVNPGPAMASHKDDEEKFFPMHGTLIFGKQGTNANDADLEHVMITDEEEIRTTNPVATEQYGNVSNNLQNSNTGPTTENVNHQGALPGMVWQDRDVYLQGPIWAKIPHTDGHFHPSPLMGGFGLKHPPPQIMIKNTPVPANPPTNFSAAKFASFITQYSTGQVSVEIEWEPQKENSKRWNPEIQYTSNYNKSVNVDFTVDTNGVYSEPRPIGTRYLTRNL

SEQ ID NO: 4213 - protein, 735 aa, Artificial Sequence
  Description of Artificial Sequence: Synthetic polypeptide
MAADGYLPDWLEDTLSEGIRQWWKLKPGPPPPKPAERHQDDSRGLVLPGYKYLGPFNGLDKGEPVNEADAAALEHDKAYDRQLDSGDNPYLKYNHADAEFQERLKEDTSFGGNLGRAVFQAKKRVLEPLGLVEEPVKTAPGKKRPVEHSPAEPDSSSGTGKAGQQPARKRLNFGQTGDADSVPDPQPLGQPPAAPTSLGSTTMATGSGAPMADNNEGADGVGNSSGNWHCDSQWLGDRVITTSTRTWALPTYNNHLYKQISSQSGASNDNHYFGYSTPWGYFDFNRFHCHFSPRDWQRLINNNWGFRPKRPNFKLFNIQVKEVTQNDGTTTIANNLTSTVQVFTDSEYQLPYVLGSAHQGCLPPFPADVFMVPQYGYLTLNNGSQAVGRSSFYCLEYFPSQMLRTGNNFTFSYTFEDVPFHSSYAHSQSLDRLMNPLIDQYLYYLNRTQSNSGTLQQSRLLFSQAGPTSMSLQAKNWLPGPCYRQQRLSKQANDNNNSNFPWTAATKYHLNGRDSLVNPGPAMASHKDDEEKFFPMHGTLIFGKQGTNANDADLEHVMITDEEEIRTTNPVATEQYGNVSNNLQNSNTGPTTENVNHQGALPGMVWQDRDVYLQGPIWAKIPHTDGHFHPSPLMGGFGLKHPPPQIMIKNTPVPANPPTNFSAAKFASFITQYSTGQVSVEIEWELQKENSKRWNPEIQYTSNYNKSVNVDFTVDTNGVYSEPRPIGTRYLTRNL

SEQ ID NO: 4214 - protein, 735 aa, Artificial Sequence
  Description of Artificial Sequence: Synthetic polypeptide
MAADGYLPDWLEDTLSEGIRQWWKLKPGPPPPKPAERHQDDSRGLVLPGYKYLGPFNGLDKGEPVNEADAAALEHDKAYDRQLDSGDNPYLKYNHADAEFQERLKEDTSFGGNLGRAVFQAKKRVLEPLGLVEEPVKTAPGKKRPVEHSPAEPDSSSGTGKAGQQPARKRLNFGQTGDADSVPDPQPLGQPPAAPTSLGSTTMATGSGAPMADNNEGADGVGNSSGNWHCDSQWLGDRVITTSTRTWALPTYNNHLYKQISSQSGASNDNHYFGYSTPWGYFDFNRFHCHFSPRDWQRLINNNWGFRPKRLNFKLFNIQVKEVTQNDGTTTIANNLTSTVQVFTDSEYQLPYVLGSAHQGCLPPFPADVFMVPQYGYLTLNNGSQAVGRSSFYCLEYFPSQMLRTGNNFTFSYTFEDVPFHSSYAHSQSLDRLMNPLIDQYLYYLNRTQSNSGTLQQSRLLFSQAGPTSMSLQAKNWLPGPCYRQQRLSKQANDNNNSNFPWTAATKYHLNGRDSLVNPGPAMASHKDDEEKFFPMHGTLIFGKQGTNANDADLEHVVITDEEEIRTTNPVATEQYGNVSNNLQNSNTGPTTENVNHQGALPGMVWQDRDVYLQGPIWAKIPHTDGHFHPSPLMGGFGLKHPPPQIMIKNTPVPANPPTNFSAAKFASFITQYSTGQVSVEIEWELQKENSKRWNPEIQYTSNYNKSVNVDFTVDTNGVYSEPRPIGTRYLTRNL

SEQ ID NO: 4215 - protein, 735 aa, Artificial Sequence
  Description of Artificial Sequence: Synthetic polypeptide
MAADGYLPDWLEDTLSEGIRQWWKLKPGPPPPKPAERHQDDSRGLVLPGYKYLGPFNGLDKGEPVNEADAAALEHDKAYDRQLDSGDNPYLKYNHADAEFQERLKEDTSFGGNLGRAVFQAKKRVLEPLGLVEEPVKTAPGKKRPVEHSPAEPDSSSGTGKAGQQPARKRLNFGQTGDADSVPDPQPLGQPPAAPTSLGSTTMATGSGAPMADNNEGADGVGNSSGNWHCDSQWLGDRVITTSTRTWALPTYNNHLYKQISSQSGASNDNHYFGYSTPWGYFDFNRFHCHFSPRDWQRLINNNWGFRPKRLNFKLFNIQVKEVTQNDGTTTIANNLTSTVQVFTDSEYQLPYVLGSAHQGCLPPFPADVFMVPQYGYLTLNNGSQAVGRSSFYCLEYFPSQMLRTGNNFTFSYTFEDVPFHSSYAHSQSLDRLMNPLIDQYLYYLNRTQSNSGTLQQSRLLFSQAGPTSMSLQAKNWLPGPCYRQQRLSKQANDNNNSNFPWTAATKYHLNGRDSLVNPGPAMASHKDDEEKFFPMHGTLIFGKQGTNANDADLEHVMITDEEEIRTTNPVATEQYGNVSNNLQNSNTGPTTENVNHQGALPGMVWRDRDVYLQGPIWAKIPHTDGHFHPSPLMGGFGLKHPPPQIMIKNTPVPANPPTNFSAAKFASFITQYSTGQVSVEIEWELQKENSKRWNPEIQYTSNYNKSVNVDFTVDTNGVYSEPRPIGTRYLTRNL

SEQ ID NO: 4216 - protein, 735 aa, Artificial Sequence
  Description of Artificial Sequence: Synthetic polypeptide
MAADGYLPDWLEDTLSEGIRQWWKLKPGPPPPKPAERHQDDSRGLVLPGYKYLGPFNGLDKGEPVNEADAAALEHDKAYDRQLDSGDNPYLKYNHADAEFQERLKEDTSFGGNLGRAVFQAKKRVLEPLGLVEEPVKTAPGKKRPVEHSPAEPDSSSGTGKAGQQPARKRLNFGQTGGADSVPDPQPLGQPPAAPTSLGSTTMATGSGAPMADNNEGADGVGNSSGNWHCDSQWLGDRVITTSTRTWALPTYNNHLYKQISSQSGASNDNHYFGYSTPWGYFDFNRFHCHFSPRDWQRLINNNWGFRPKRLNFKLFNIQVKEVTQNDGTTTIANNLTSTVQVFTDSEYQLPYVLGSAHQGCLPPFPADVFMVPQYGYLTLNNGSQAVGRSSFYCLEYFPSQMLRTGNNFTFSYTFEDVPFHSSYAHSQSLDRLMNPLIDQYLYYLNRTQSNSGTLQQSRLLFSQAGPTSMSLQAKNWLPGPCYRQQRLSKQANDNNNSNFPWTAATKYHLNGRDSLVNPGPAMASHKDDEEKFFPMHGTLIFGKQGTNANDADLEHVMITDEEEIRTTNPVATEQYGNVSNNLQNSNTGPTTENVNHQGALPGMVWQDRDVYLQGPIWAKIPHTDGHFHPSPLMGGFGLKHPPPQIMIKNTPVPANPPTNFSAAKFASFITQYSTGQVSVEIEWELQKENSKRWNPEIQYTSNYNKSVNVDFTVDTNGVYSEPRPIGTRYLTRNL

SEQ ID NO: 4217 - protein, 735 aa, Artificial Sequence
  Description of Artificial Sequence: Synthetic polypeptide
MAADGYLPDWLEDTLSEGIRQWWKLKPGPPPPKPAERHQDDSRGLVLPGYKYLGPFNGLDKGEPVNEADAAALEHDKAYDRQLDSGDNPYLKYNHADAEFQERLKEDTSFGGNLGRAVFQAKKRVLEPLGLVEEPVKTAPGKKRPVEHSPAEPDSSSGTGKAGQQPARKRLNFGQTGDADSVPDPQPLGQPPAAPTSLGSTTMATGSGAPMADNNEGTDGVGNSSGNWHCDSQWLGDRVITTSTRTWALPTYNNHLYKQISSQSGASNDNHYFGYSTPWGYFDFNRFHCHFSPRDWQRLINNNWGFRPKRLNFKLFNIQVKEVTQNDGTTTIANNLTSTVQVFTDSEYQLPYVLGSAHQGCLPPFPADVFMVPQYGYLTLNNGSQAVGRSSFYCLEYFPSQMLRTGNNFTFSYTFEDVPFHSSYAHSQSLDRLMNPLIDQYLYYLNRTQSNSGTLQQSRLLFSQAGPTSMSLQAKNWLPGPCYRQQRLSKQANDNNNSNFPWTAATKYHLNGRDSLVNPGPAMASHKDDEEKFFPMHGTLIFGKQGTNANDADLEHVMITDEEEIRTTNPVATEQYGNVSNNLQNSNTGPTTENVNHQGALPGMVWQDRDVYLQGPIWAKIPHTDGHFHPSPLMGGFGLKHPPPQIMIKNTPVPANPPTNFSAAKFASFITQYSTGQVSVEIEWELQKENSKRWNPEIQYTSNYNKSVNVDFTVDTNGVYSEPRPIGTRYLTRNL

SEQ ID NO: 4218 - protein, 735 aa, Artificial Sequence
  Description of Artificial Sequence: Synthetic polypeptide
MAADGYLPDWLEDTLSEGIRQWWKLKPGPPPPKPAERHQDDSRGLVLPGYKYLGPFNGLDKGEPVNEADAAALEHDKAYDRQLDSGDNPYPKYNHADAEFQERLKEDTSFGGNLGRAVFQAKKRVLEPLGLVEEPVKTAPGKKRPVEHSPAEPDSSSGTGKAGQQPARKRLNFGQTGDADSVPDPQPLGQPPAAPTSLGSTTMATGSGAPMADNNEGADGVGNSSGNWHCDSQWLGDRVITTSTRTWALPTYNNHLYKQISSQSGASNDNHYFGYSTPWGYFDFNRFHCHFSPRDWQRLINNNWGFRPKRLNFKLFNIQVKEVTQNDGTTTIANNLTSTVQVFTDSEYQLPYVLGSAHQGCLPPFPADVFMVPQYGYLTLNNGSQAVGRSSFYCLEYFPSQMLRTGNNFTFSYTFEDVPFHSSYAHSQSLDRLMNPLIDQYLYYLNRTQSNSGTLQQSRLLFSQAGPTSMSLQAKNWLPGPCYRQQRLSKQANDNNNSNFPWTAATKYHLNGRDSLVNPGPAMASHKDDEEKFFPMHGTLIFGKQGTNANDADLEHVMITDEEEIRTTNPVATEQYGNVSNNLQNSNTGPTTENVNHQGALPGMVWQDRDVYLQGPIWAKIPHTDGHFHPSPLMGGFGLKHPPPQIMIKNTPVPANPPTNFSAAKFASFITQYSTGQVSVEIEWELQKENSKRWNPEIQYTSNYNKSVNVDFTVDTNGVYSEPRPIGTRYLTRNL

SEQ ID NO: 4219 - protein, 735 aa, Artificial Sequence
  Description of Artificial Sequence: Synthetic polypeptide
MAADGYLPDWLEDTLSEGIRQWWKLKPGPPPPKPAERHQDDSRGLVLPGYKYLGPFNGLDKGEPVNEADAAALEHDKAYDRQLDSGDNPYLKYNHADAEFQERLKEDTSFGGNLGRAVFQAKKRVLEPLGLVEEPVKTAPGKKRPVEHSPAEPDSSSGTGKAGQQPARKRLNFGQTGDADSVPDPQPLGQPPAAPTSLGSTTMATGSGAPMADNNEGADGVGNSSGNWHCDSQWLGDRVITTSTRTWALPTYNNHLYKQISSQSGASNDNHYFGYSTPWGYFDFNRFHCHFSPRDWQRLINNNWGFRPKRLNFKLFNIQVKEVTQNDGTTTIANNLTSTVQVFTDSEYQLPYVLGSAHQGCLPPFPADVFMVPQYGYLTLNNGSQAVGRSSFYCLEYFPSQMLRTGNNFTFSYTFEDVPFHSSYAHSQSLDRLMNPLIDQYLYYLNRTQSNSGTLQQSRLLFSQAGPTSMSLQAKNWLPGPCYRQQRLSKQANDNNNSNFPWTAATKYHLNGRDSLVNPGPAMASHKDDEEKFFPMHGTLIFGKQGTNANDADLEHVMITDEEEIRATNPVATEQYGNVSNNLQNSNTGPTTENVNHQGALPGMVWQDRDVYLQGPIWAKIPHTDGHFHPSPLMGGFGLKHPPPQIMIKNTPVPANPPTNFSAAKFASFITQYSTGQVSVEIEWELQKENSKRWNPEIQYTSNYNKSVNVDFTVDTNGVYSEPRPIGTRYLTRNL

SEQ ID NO: 4220 - protein, 735 aa, Artificial Sequence
  Description of Artificial Sequence: Synthetic polypeptide
MAADGYLPDWLEDTLSEGIRQWWKLKPGPPPPKPAERHQDDSRGLVLPGYKYLGPFNGLDKGEPVNEADAAALEHDKAYDRQLDSGDNPYLKYNHADAEFQERLKEDTSFGGNLGRAVFQAKKRVLEPLGLVEEPVKTAPGKKRPVEHSPAEPDSSSGTGKAGQQPARKRLNFGQTGDADSVPDPQPLGQPPAAPTSLGSTTMATGSGAPMADNNEGADGVGNSSGNWHCDSQWLGDRVITTSTRTWALPTYNNHLYKQISSQSGASNDNHYFGYSTPWGYFDFNRFHCRFSPRDWQRLINNNWGFRPKRLNFKLFNIQVKEVTQNDGTTTIANNLTSTVQVFTDSEYQLPYVLGSAHQGCLPPFPADVFMVPQYGYLTLNNGSQAVGRSSFYCLEYFPSQMLRTGNNFTFSYTFEDVPFHSSYAHSQSLDRLMNPLIDQYLYYLNRTQSNSGTLQQSRLLFSQAGPTSMSLQAKNWLPGPCYRQQRLSKQANDNNNSNFPWTAATKYHLNGRDSLVNPGPAMASHKDDEEKFFPMHGTLIFGKQGTNANDADLEHVMITDEEEIRTTNPVATEQYGNVSNNLQNSNTGPTTENVNHQGALPGMVWQDRDVYLQGPIWAKIPHTDGHFHPSPLMGGFGLKHPPPQIMIKNTPVPANPPTNFSAAKFASFITQYSTGQVSVEIEWELQKENSKRWNPEIQYTSNYNKSVNVDFTVDTNGVYSEPRPIGTRYLTRNL

SEQ ID NO: 4221 - protein, 735 aa, Artificial Sequence
  Description of Artificial Sequence: Synthetic polypeptide
MAADGYLPDWLEDTLSEGIRQWWKLKPGPPPPKPAERHQDDSRGLVLPGYKYLGPFNGLDKGEPVNEADAAALEHDKAYDRQLDSGDNPYLKYNHADAEFQERLKEDTSFGGNLGRAVFQAKKRVLEPLGLVEEPVKTAPGKKRPVEHSPAEPDSSSGTGKAGQQPARKRLNFGQTGDADSVPDPQPLGQPPAAPTSLGSTTMATGSGAPMADNNEGADGVGNSSGNWHCDSQWLGDRVITTSTRTWALPTYNNHLYKQISSQSGASNDNHYFGYSTPWGYFDFNRFHCHFSPRDWQRLINNNWGFRPKRLNFKLFNIQVKEVTQNDGTTTIANNLTSTVQVFTDSEYQLPYVLGSAHQGCLPPFPADVFMVPQYGYLTLNNGSQAVGRSSFYCLEYFPSQMLRTGNNFTFSYTFEDVPFRSSYAHSQSLDRLMNPLIDQYLYYLNRTQSNSGTLQQSRLLFSQAGPTSMSLQAKNWLPGPCYRQQRLSKQANDNNNSNFPWTAATKYHLNGRDSLVNPGPAMASHKDDEEKFFPMHGTLIFGKQGTNANDADLEHVMITDEEEIRTTNPVATEQYGNVSNNLQNSNTGPTTENVNHQGALPGMVWQDRDVYLQGPIWAKIPHTDGHFHPSPLMGGFGLKHPPPQIMIKNTPVPANPPTNFSAAKFASFITQYSTGQVSVEIEWELQKENSKRWNPEIQYTSNYNKSVNVDFTVDTNGVYSEPRPIGTRYLTRNL

SEQ ID NO: 4222 - protein, 735 aa, Artificial Sequence
  Description of Artificial Sequence: Synthetic polypeptide
MAADGYLPDWLEDTLSEGIRQWWKLKPGPPPPKPAERHQDDSRGLVLPGYKYLGPFNGLDKGEPVNEADAAALEHDKAYDRQLDSGDNPYLKYNHADAEFQERLKEDTSFGGNLGRAVFQAKKRVLEPLGLVEEPVKTAPGKKRPVEHSPAEPDSSSGTGKAGQQPARKRLNFGQTGDADSVPDPQPLGQPPAAPTSLGSTTMATGSGAPMADNNEGADGVGNSSGNWHCDSQWLGDRVITTSTRTWALPTYSNHLYKQISSQSGASNDNHYFGYSTPWGYFDFNRFHCHFSPRDWQRLINNNWGFRPKRLNFKLFNIQVKEVTQNDGTTTIANNLTSTVQVFTDSEYQLPYVLGSAHQGCLPPFPADVFMVPQYGYLTLNNGSQAVGRSSFYCLEYFPSQMLRTGNNFTFSYTFEDVPFHSSYAHSQSLDRLMNPLIDQYLYYLNRTQSNSGTLQQSRLLFSQAGPTSMSLQAKNWLPGPCYRQQRLSKQANDNNNSNFPWTAATKYHLNGRDSLVNPGPAMASHKDDEEKFFPMHGTLIFGKQGTNANDADLEHVMITDEEEIRTTNPVATEQYGNVSNNLQNSNTGPTTENVNHQGALPGMVWQDRDVYLQGPIWAKIPHTDGHFHPSPLMGGFGLKHPPPQIMIKNTPVPANPPTNFSAAKFASFITQYSTGQVSVEIEWELQKENSKRWNPEIQYTSNYNKSVNVDFTVDTNGVYSEPRPIGTRYLTRNL

SEQ ID NO: 4223 - protein, 735 aa, Artificial Sequence
  Description of Artificial Sequence: Synthetic polypeptide
MAADGYLPDWLEDTLSEGIRQWWKLKPGPPPPKPAERHQDDSRGLVLPGYKYLGPFNGLDKGEPVNEADAAALEHDKAYDRQLDSGDNPYLKYNHADAEFQERLKEDTSFGGNLGRAVFQAKKRVLEPLGLVEEPVKTAPGKKRPVEHSPAEPDSSSGTGKAGQQPARKRLNFGQTGDADSVPDPQPLGQPPAAPTSLGSTTMATGSGAPMADNNEGADGVGNSSGNWHCDSQWLGDRVITTSTRTWALPTYNNHLYKQISSQSGASNDNHYFGYSTPWGYFDFNRFHCHFSPRDWQRLINNNWGFRPKRLNFKPFNIQVKEVTQNDGTTTIANNLTSTVQVFTDSEYQLPYVLGSAHQGCLPPFPADVFMVPQYGYLTLNNGSQAVGRSSFYCLEYFPSQMLRTGNNFTFSYTFEDVPFHSSYAHSQSLDRLMNPLIDQYLYYLNRTQSNSGTLQQSRLLFSQAGPTSMSLQAKNWLPGPCYRQQRLSKQANDNNNSNFPWTAATKYHLNGRDSLVNPGPAMASHKDDEEKFFPMHGTLIFGKQGTNANDADLEHVMITDEEEIRTTNPVATEQYGNVSNNLQNSNTGPTTENVNHQGALPGMVWQDRDVYLQGPIWAKIPHTDGHFHPSPLMGGFGLKHPPPQIMIKNTPVPANPPTNFSAAKFASFITQYSTGQVSVEIEWELQKENSKRWNPEIQYTSNYNKSVNVDFTVDTNGVYSEPRPIGTRYLTRNL

SEQ ID NO: 4224 - protein, 735 aa, Artificial Sequence
  Description of Artificial Sequence: Synthetic polypeptide
MAADGYLPDWLEDTLSEGIRQWWKLKPGPPPPKPAERHQDDSRGLVLPGYKYLGPFNGLDKGEPVNEADAAALEHDKAYDRQLDSGDNPYLKYNHADAEFQERLKEDTSFGGNLGRAVFQAKKRVLEPLGLVEEPVKTAPGKKRPVEHSPAEPDSSSGTGKAGQQPARKRLNFGQTGDADSVPDPQPLGQPPAAPTSLGSTTMATGSGAPMADNNEGADGVGNSSGNWHCDSQWLGDRVITTSTRTWALPTYNNHLYKQISSQSGASNGNHYFGYSTPWGYFDFNRFHCHFSPRDWQRLINNNWGFRPKRLNFKLFNIQVKEVTQNDGTTTIANNLTSTVQVFTDSEYQLPYVLGSAHQGCLPPFPADVFMVPQYGYLTLNNGSQAVGRSSFYCLEYFPSQMLRTGNNFTFSYTFEDVPFHSSYAHSQSLDRLMNPLIDQYLYYLNRTQSNSGTLQQSRLLFSQAGPTSMSLQAKNWLPGPCYRQQRLSKQANDNNNSNFPWTAATKYHLNGRDSLVNPGPAMASHKDDEEKFFPMHGTLIFGKQGTNANDADLEHVMITDEEEIRTTNPVATEQYGNVSNNLQNSNTGPTTENVNHQGALPGMVWQDRDVYLQGPIWAKIPHTDGHFHPSPLMGGFGLKHPPPQIMIKNTPVPANPPTNFSAAKFASFITQYSTGQVSVEIEWELQKENSKRWNPEIQYTSNYNKSVNVDFTVDTNGVYSEPRPIGTRYLTRNL

SEQ ID NO: 4225 - protein, 735 aa, Artificial Sequence
  Description of Artificial Sequence: Synthetic polypeptide
MAADGYLPDWLEDTLSEGIRQWWKLKPGPPPPKPAERHQDDSRGLVLPGYKYLGPFNGLDKGEPVNEADAAALEHDKAYDRQLDSGDNPYLKYNHADAEFQERLKEDTSFGGNLGRAVFQAKKRVLEPLGLVEEPVKTAPGKKRPVEHSPAEPDSSSGTGKAGQQPARKRLNFGQTGDADSVPDPQPLGQPPAAPTSLGSTTMATGSGAPMADNNEGADGVGNSSGNWHCDSQWLGDRVITTSTRTWALPTYNNHLYKQISSQSGASNDNHYFGYSTPWGYFDFNRFHCHFSPRDWQRLINNNWGFRPKRLNFKLFNIQVKEVTQNDGTTTIANNLTSTVQVFTDSEYQLPYVLGSAHQGCLPPFPADVFMVPQYGYLTLNNGSQAVGRSSFYCLEYFPSQMLRTGNNFTFSYTFEDVPFHSSYAHSQSLDRLMNPLIDQYLYYLNRTQSNSGTLQQSRLLFSQAGPTSMSLQAKNWLPGPCYRQQRLSKQANDNNNSNFPWTAATKYHLNGRDSLVNPGPAMASHKDDEEKFFPMHGTLIFGKQGTNANDADLEHVMITDEEEIRTANPVATEQYGNVSNNLQNSNTGPTTENVNHQGALPGMVWQDRDVYLQGPIWAKIPHTDGHFHPSPLMGGFGLKHPPPQIMIKNTPVPANPPTNFSAAKFASFITQYSTGQVSVEIEWELQKENSKRWNPEIQYTSNYNKSVNVDFTVDTNGVYSEPRPIGTRYLTRNL

SEQ ID NO: 4226 - protein, 735 aa, Artificial Sequence
  Description of Artificial Sequence: Synthetic polypeptide
MAADGYLPDWLEDTLSEGIRQWWKLKPGPPPPKPAERHQDDSRGLVLPGYKYLGPFNGLDKGEPVNEADAAALEHDKAYDRQLDSGDNPYLKYNHADAEFQERLKEDTSFGGNLGRAVFQAKKRVLEPLGLVEEPVKTAPGKKRPVEHSPAEPDSSSGTGKAGQQPARKRLNFGQTGDADSVPDPQPLGQPPAAPTSLGSTTMATGSGAPMADNNEGADGVGNSSGNWHCDSQWLGDRVITTSTRTWALPTYNNHLYKQISSQSGASNDNHYFGYSTPWGYFDFNRFHCHFSPRDWQRLINNNWGFRPKRLNFKLFNIQVKEVTQNDGTTTIANNLTSTVQVFTDSEYQLPYVLGSAHQGCLPPFPADVFMVPQYGYLTLNNGSQAVGRSSFYCLEYFPSQMLRTGNNFTFSYTFEGVPFHSSYAHSQSLDRLMNPLIDQYLYYLNRTQSNSGTLQQSRLLFSQAGPTSMSLQAKNWLPGPCYRQQRLSKQANDNNNSNFPWTAATKYHLNGRDSLVNPGPAMASHKDDEEKFFPMHGTLIFGKQGTNANDADLEHVMITDEEEIRTTNPVATEQYGNVSNNLQNSNTGPTTENVNHQGALPGMVWQDRDVYLQGPIWAKIPHTDGHFHPSPLMGGFGLKHPPPQIMIKNTPVPANPPTNFSAAKFASFITQYSTGQVSVEIEWELQKENSKRWNPEIQYTSNYNKSVNVDFTVDTNGVYSEPRPIGTRYLTRNL

SEQ ID NO: 4227 - protein, 735 aa, Artificial Sequence
  Description of Artificial Sequence: Synthetic polypeptide
MAADGYLPDWLEDTLSEGIRQWWKLKPGPPPPKPAERHQDDSRGLVLPGYKYLGPFNGLDKGEPVNEADAAALEHDKAYDRQLDSGDNPYLKYNHADAEFQERLKEDTSFGGNLGRAVFQAKKRVLEPLGLVEEPVKTAPGKKRPVEHSPAEPDSSSGTGKAGQQPARKRLNFGQTGDADSVPDPQPLGQPPAAPTSLGSTTMATGSGAPMADNNEGADGVGNSSGNWHCDSQWLGDRVITTSTRTWALPTYNNHLYKQISSQSGASNDNHYFGYSTPWGYFDFNRFHCHFSPRDWQRLINNNWGFRPKRLNFKLFNIQVKEVTQNDGTTTIANNLTSTVQVFTDSEYQLPYVLGSAHQGCLPPFPADVFMVPQYGYLTLNNGSQAVGRSSFYCLEYFPSQMLRTGNNFTFSYTFEDVPFHSSYAHSQSLDRLMNPLIDQYLYYLNRTQSNSGTLQQSRLLFSQAGPTSMSLQAKNWLPGPCYRQQRLSKQANDNNNSNFPWTAATKYHLNGRDSLVNPGPAMASHKDDEEKFFPMHGTLIFGKQGTNANDADLEHVMITDEEEIRTTNPVATEQYGNVSNNLQNSNTGPTTENVNHQGALPGMVWQDRDVYLQGPIWAKIPHTDGHFHPSPLMGGFGLKHPPPQIMIKNTPVPANPPTNFSAAKFASFITQYSTGQVSVEIEWELQKENSKRWNPEIQYTSNYSKSVNVDFTVDTNGVYSEPRPIGTRYLTRNL

SEQ ID NO: 4228 - protein, 735 aa, Artificial Sequence
  Description of Artificial Sequence: Synthetic polypeptide
MAADGYLPDWLEDTLSEGIRQWWRLKPGPPPPKPAERHQDDSRGLVLPGYKYLGPFNGLDKGEPVNEADAAALEHDKAYDRQLDSGDNPYLKYNHADAEFQERLKEDTSFGGNLGRAVFQAKKRVLEPLGLVEEPVKTAPGKKRPVEHSPAEPDSSSGTGKAGQQPARKRLNFGQTGDADSVPDPQPLGQPPAAPTSLGSTTMATGSGAPMADNNEGADGVGNSSGNWHCDSQWLGDRVITTSTRTWALPTYNNHLYKQISSQSGASNDNHYFGYSTPWGYFDFNRFHCHFSPRDWQRLINNNWGFRPKRLNFKLFNIQVKEVTQNDGTTTIANNLTSTVQVFTDSEYQLPYVLGSAHQGCLPPFPADVFMVPQYGYLTLNNGSQAVGRSSFYCLEYFPSQMLRTGNNFTFSYTFEDVPFHSSYAHSQSLDRLMNPLIDQYLYYLNRTQSNSGTLQQSRLLFSQAGPTSMSLQAKNWLPGPCYRQQRLSKQANDNNNSNFPWTAATKYHLNGRDSLVNPGPAMASHKDDEEKFFPMHGTLIFGKQGTNANDADLEHVMITDEEEIRTTNPVATEQYGNVSNNLQNSNTGPTTENVNHQGALPGMVWQDRDVYLQGPIWAKIPHTDGHFHPSPLMGGFGLKHPPPQIMIKNTPVPANPPTNFSAAKFASFITQYSTGQVSVEIEWELQKENSKRWNPEIQYTSNYNKSVNVDFTVDTNGVYSEPRPIGTRYLTRNL

SEQ ID NO: 4229 - protein, 735 aa, Artificial Sequence
  Description of Artificial Sequence: Synthetic polypeptide
MAADGYLPDWLEDTLSEGIRQWWKLKPGPPPPKPAERHKDDSRGLVLPGYKYLGPFNGLDKGEPVNEADAAALEHDKAYDRQLDSGDNPYLKYNHADAEFQERLKEDTSFGGNLGRAVFQAKKRVLEPLGLVEEPVKTAPGKKRPVEHSPVEPDSSSGTGKAGQQPARKRLNFGQTGDADSVPDPQPLGQPPAAPTSLGSTTMATGSGAPMADNNEGADGVGNSSGNWHCDSQWLGDRVITTSTRTWALPTYNNHLYKQISSQSGASNDNHYFGHSTPWGYFDFNRFHCHFSPRDWQRLINNNWGFRPKRLNFKLFNIQVKEVTQNDGTTTIANNLTSTVQVFTDSEYQLPYVLGSAHQGCLPPFPADVFMVPQYGYLTLNNGSQAVGRSSFYCLEYFPSQMLRTGNNFTFSYTFEDVPFHSSYAHSQSLDRLMNPLIDQYLYYLNKTQSNSGTLQQSRLLFSQAGPTSMSLQAKNWLPGPCYRQQRLSKQANDNNNSNFPWTAATKYHLNGRDSLVNPGPAMASHKDDEEKFFPMHGTLIFGKQGTNANDADLDNVMITDEEEIRTTNPVATEQYGTVSNNLQNSNTGPTTGTVNHQGALPGMVWQDRDVYLQGPIWAKIPHTDGHFHPSPLMGGFGLKHPPPQIMIKNTPVPANPPTNFSSAKSASFITQYSTGQVSVEIEWELQKENSKRWNPEIQYTSNYNKSVNVDFTVDTNGVYSEPRPIGTRYLTRNL

SEQ ID NO: 4230 - protein, 735 aa, Artificial Sequence
  Description of Artificial Sequence: Synthetic polypeptide
MAADGYLPDWLEDTLSEGIRQWWKLKPGPPPPKPAERHKDDSRGLVLPGYKYLGPFNGLDKGEPVNEADAAALEHDKAYDRQLDSGDNPYLKYNHADAEFQERLKEDTSFGGNLGRAVFQAKKRVLEPLGLVEEPVKTAPGKKRPVEHSPVEPDSSSGTGKAGQQPARKRLNFGQTGDADSVPDPQPLGQPPAAPSGLGTNTMATGSGAPMADNNEGADGVGNSSGNWHCDSTWMGDRVITTSTRTWALPTYNNHLYKQISSQSGASNDNHYFGYSTPWGYFDFNRFHCHFSPRDWQRLINNNWGFRPKRLNFKLFNIQVKEVTQNDGTTTIANNLTSTVQVFTDSEYQLPYVLGSAHQGCLPPFPADVFMVPQYGYLTLNNGSQAVGRSSFYCLEYFPSQMLRTGNNFTFSYTFEDVPFHSSYAHSQSLDRLMNPLIDQYLYYLNKTQSNSGTLQQSRLLFSQAGPTSMSLQAKNWLPGPCYRQQRLSKQANDNNNSNFPWTAATKYHLNGRDSLVNPGPAMASHKDDEEKFFPMHGTLIFGKQGTNANDADLDNVMITDEEEIRTTNPVATEQYGTVSNNLQNSNTGPTTGTVNHQGALPGMVWQDRDVYLQGPIWAKIPHTDGHFHPSPLMGGFGLKHPPPQIMIKNTPVPANPPTNFSSAKFASFITQYSTGQVSVEIEWELQKENSKRWNPEIQYTSNYNKSVNVDFTVDTNGVYSEPRPIGTRYLTRNL

SEQ ID NO: 4231 - protein, 735 aa, Artificial Sequence
  Description of Artificial Sequence: Synthetic polypeptide
MAADGYLPDWLEDTLPEGIRQWWKLKPGPPPPKPAERHKDDSRGLVLPGYKYLGPFNGLDKGEPVNEADAAALEHDKAYDRQLDSGDNPYLKYNHADAEFQERLKEDTSFGGNLGRAVFQAKKRVLEPLGLVEEPVKTAPGKKRPVEHSPVEPDSSSGTGKAGQQPARKRLNFGQTGDADSVPDPQPLGQPPAAPTSLGSTTMATGSGAPMADNNEGADGVGNSSGNWHCDSQWLGDRVITTSTRTWALPTYNNHLYKQISSQSGASNDNHYFGHSTPWGYFDFNRFHCHFSPRDWQRLINNNWGFRPKRLNFKLFNIQVKEVTQNDGTTTIANNLTSTVQVFTDSEYQLPYVLGSAHQGCLPPFPADVFMVPQYGYLTLNNGSQAVGRSSFYCLEYFPSQMLRTGNNFTFSYTFEDVPFHSSYAHSQSLDRLMNPLIDQYLYYLNKTQSNSGTLQQSRLLFSQAGPTSMSLQAKNWLPGPCYRQQRLSKQANDNNNSNFPWTAATKYHLNGRDSLVNPGPAMASHKDDEEKFFPMHGTLIFGKQGTNANDADLDNVMITDEEEIRTTNPVATEQYGTVSNNLQNSNTGPTTGTVNHQGALPGMVWQDRDVYLQGPIWAKIPHTDGHFHPSPLMGGFGLKHPPPQIMIKNTPVPANPPTNFSSAKFASFITQYSTGQVSVEIEWELQKENSKRWNPEIQYTSNYNKSVNVDFTVDTNGVYSEPRPIGTRYLTRNL

SEQ ID NO: 4232 - protein, 735 aa, Artificial Sequence
  Description of Artificial Sequence: Synthetic polypeptide
MAADGYLPDWLEDTLSEGIRQWWKLKPGPPPPKPAERHKDDSRGLVLPGYKYLGPFNGLDKGEPVNEADAAALEHDKAYDRQLDSGDNPYLKYNHADAEFQERLKEDTSFGGNLGRAVFQAKKRVLEPLGLVEEPVKTAPGKKRPVEHSPVEPDSSSGTGKAGQQPARKRLNFGQTGDADSVPDPQPLGQTPAAPTSLGSTTMATGSGAPMADNNEGADGVGNSSGNWHCDSQWLGDRVITTSTRTWALPTYNNHLYKQISSQSGASNDNHYFGYSTPWGYFDFNRFHCHFSPRDWQRLINNNWGFRPKRLNFKLFNIQVKEVTQNDGTTTIANNLTSTVQVFTDSEYQLPYVLGSAHQGCLPPFPADVFMVPQYGYLTLNNGSQAVGRSSFYCLEYFPSQMLRTGNNFTFSYTFEDVPFHSSYAHSQSLDRLMNPLIDQYLYYLNKTQSNSGTLQQSRLLFSQAGPTSMSLQAKNWLPGPCYRQQRLSKQANDNNNSNFPWTAATKYHLNGRDSLVNPGPAMASHKDDEEKFFPMHGTLIFGKQGTNANDADLDNVMITDEEEIRTTNPVATEQYGTVSNNLQNSNTGPTTGTVNHQGALPGMVWQDRDVYLQGPIWAKIPHTDGHFHPSPLMGGFGLKHPPPQIMIKNTPVPANPPTNFSSAKFASFITQYSTGQVGVEIEWELQKENSKRWNPEIQYTSNYNKSVNVDFTVDTNGVYSEPRPIGTRYLTRNL

SEQ ID NO: 4233 - protein, 735 aa, Artificial Sequence
  Description of Artificial Sequence: Synthetic polypeptide
MAADGYLPDWLEDTLSEGIRQWWKLKPGPPPPKPAERHKDDSRGLVLPGYKYLGPFNGLDKGEPVNEADAAALEHDKAYDRQLDSGDNPYLKYNHADAEFQERLKEDTSFGGNLGRAVFQAKKRVLEPLGLVEEPVKTAPGKKRPVEHSPVEPDSSSGTGKAGQQPARKRLNFGQTGDADSVPDPQPLGQTPAAPTSLGSTTMATGSGAPMADNNEGADGVGNSSGNWHCDSQWLGDRVITTSTRTWALPTYNNHLYKQISSQSGASNDNHYFGYSTPWGYFDFNRFHCHFSPRDWQRLINNNWGFRPKRLNFKLFNIQVKEVTQNDGTTTIANNLTSTVQVFTDSEYQLPYVLGSAHQGCLPPFPADVFMVPQYGYLTLNNGSQAVGRSSFYCLEYFPSQMLRTGNNFTFSYTFEDVPFHSSYAHSQSLDRLMNPLIDQYLYYLNKTQSNSGTLQQSRLLFSQAGPTSMSLQAKNWLPGPCYRQQRLSKQANDNNNSNFPWTAATKYHLNGRDSLVNPGPAMASHKDDEEKFFPMHGTLIFGKQGTNANDADLDNVMITDEEEIRTTNPVATEQYGTVSNNLQNSNTGPTTGTVNHQGALPGMVWQDRDVYLQGPIWAKIPHTDGHFHPSPLMGGFGLKHPPPQIMIKNTPVPANPPTNFSSAKFASFITQYSTGQVSVEIEWELQKENSKRWNPEIQYTSNYNKSVNVDFTVDTNGVYSEPRPIGTRYLTRNL

SEQ ID NO: 4234 - protein, 735 aa, Artificial Sequence
  Description of Artificial Sequence: Synthetic polypeptide
MAADGYLPDWLEDTLSEGIRQWWKLKPGPPPPKPAERHKDDSRGLVLPGYKYLGPFNGLDKGEPVNEADAAALEHDKAYDRQLDSGDNPYLKYNHADAEFQERLKEDTSFGGNLGRAVFQAKKRVLEPLGLVEEPVKTAPGKKRPVEHSPVEPDSSSGTGKAGQQPARKRLNFGQTGDADSVPDPQPLGQPPAAPTSLGSTTMATGSGAPMADNNEGADGVGNSSGNRHCDSQWLGDRVITTSTRTWALPTYNNHLYKQISSQSGASNDNHYFGHSTPWGYFDFNRFHCHFSPRDWQRLINNNWGFRPKRLNFKLFNIQVKEVTQNDGTTTIANNLTSTVQVFTDSEYQLPYVLGSAHQGCLPPFPADVFMVPQYGYLTLNNGSQAVGRSSFYCLEYFPSQMLRTGNNFTFSYTFEDVPFHSSYAHSQSLDRLMNPLIDQYLYYLNKTQSNSGTLQQSRLLFSQAGPTSMSLQAKNWLPGPCYRQQRLSKQANDNNNSNFPWTAATKYHLNGRDSLVNPGPAMASHKDDEEKFFPMHGTLIFGKQGTNANDADLDNVMITDEEEIRTTNPVATEQYGTVSNNLQNSNTGPTTGTVNHQGALPGMVWQDRDVYLQGPIWAKIPHTDGHFHPSPLMGGFGLKHPPPQIMIKNTPVPANPPTNFSSAKFASFITQYSTGQVSVEIEWELQKENSKRWNPEIQYTSNYNKSVNVDFTVDTNGVYSEPRPIGTRYLTRNL

SEQ ID NO: 4235 - protein, 735 aa, Artificial Sequence
  Description of Artificial Sequence: Synthetic polypeptide
MAADGYLPDWLEDTLSEGIRQWWKLKPGPPPPKPAERHKDDSRGLVLPGYKYLGPFNGLDKGEPVNEADAAALEHDKAYDRQLDSGDNPYLKYNHADAEFQERLKEDTSFGGNLGRAVFQAKKRVLEPLGLVEEPVKTAPGKKRPVEHSPVEPDSSSGTGKAGQQPARKRLNFGQTGDADSVPDPQPLGQPPAAPTSLGSTTMATGSGAPMADNNEGADGVGNSSGNWHCDSQWLGDRVITTSTRTWALPTYNNHLYKQISSQSGASNDNHYFGYSTPWGYFDFNRFHCHFSPRDWQRLINNNWGFRPKRLNFKLFNIQVKEVTQNDGTTTIANNLTSTVQVFTDSEYQLPYVLGSAHQGCLPPFPADVFMVPQYGYLTLNNGSQAVGRSSFYCLEYFPSQMPRTGNNFTFSYTFEDVPFHSSYAHSQSLDRLMNPLIDQYLYYLNKTQSNSGTLQQSRLLFSQAGPTSMSLQAKNWLPGPCYRQQRLSKQANDNNNSNFPWTAATKYHLNGRDSLVNPGPAMASHKDDEEKFFPMHGTLIFGKQGTNANDADLDNVMITDEEEIRTTNPVATEQYGTVSNNLQNSNTGPTTGTVNHQGALPGMVWQDRDVYLQGPIWAKIPHTDGHFHPSPLMGGFGLKHPPPQIMIKNTPVPANPPTNFSSAKFASFITQYSTGQVSVEIEWELQKENSKRWNPEIQYTSNYNKSVNVDFTVDTNGVYSEPRPIGTRYLTRNL

SEQ ID NO: 4236 - protein, 735 aa, Artificial Sequence
  Description of Artificial Sequence: Synthetic polypeptide
MAADGYLPDWLEDTLSEGIRQWWKLKPGPPPPKPAERHKDDSRGLVLPGYKYLGPFNGLDKGEPVNEADAAALEHDKAYDRQLDSGDNPYLKYNHADAEFQERLKEDTSFGGNLGRAVFQAKKRVLEPLGLVEEPVKTAPGKKRPVEHSPVEPDSSSGTGKAGQQPARKRLNFGQTGDADSVPDPQPLGQPPAAPTSLGSTTMATGSGAPMADNNEGADGVGNSSGNWHCDSQWLGDRVITTSTRTWALPTYNNHLYKQISSQSGASNDNHYFGYSTPWGYFDFNRFHCHFSPRDWQRLINNNWGFRPKRLNFKLFNIQVKEVTQNDGTTTIANNLTSTVQVFTDSEYQLPYVLGSAHQGCLPPFPADVFMVPQYGYLTLNNGSQAVGRSSFYCLEYFPSQMLRTGNNFTFSYTFEDVPFHSSYAHSQSLDRLMNPLIDQYLYYLNKTQSNSGTLQQSRLLFSQAGPTSMSLQAKNWLPGPCYRQQRLSKQANDNNNSNFPWTAATKYHLNGRDSLVNPGPAMASHKDDEEKFFPMHGTLIFGKQGTNANDADLDNVMITDEEEIRTTNPVATEQYGTVSNNLQNSNTGPTTGTVNHQGALPGMVWQDRDVYLQGPIWAKIPHTDGHFHPSPLMGGFGLKHPPPQIMIKNTPVPANPPTNFSSAKSASFITQYSTGQVSVEIEWELQKENSKRWNPEIQYTSNYNKSVNVDFTVDTNGVYSEPRPIGTRYLTRNL

SEQ ID NO: 4237 - protein, 735 aa, Artificial Sequence
  Description of Artificial Sequence: Synthetic polypeptide
MAADGYLPDWLEDTLSEGIRQWWKLKPGPPPPKPAERHKDDSRGLVLPGYKYLGPFNGLDKGEPVNEADAAALEHDKAYDRQLDSGDNPYLKYNHADAEFQERLKEDTSFGGNLGRAVFQAKKRVLEPLGLVEEPVKTAPGKKRPVEHSPVEPDSSSGTGKAGQQPARKRLNFGQTGDADSVPDPQPLGQPPAAPTSLGSTTMATGSGAPMADNNEGADGVGNSSGNWHCDSQWLGDRVITTSTRTWALPTYNNHLYKQISSQSGASNDNHYFGHSTPWGYFDFNRFHCHFSPRDWQRLINNNWGFRPKRLNFKLFNIQVKEVTQNDGTTTIANNLTSTVQVFTDSEYQLPYVLGSAHQGCLPPFPADVFMVPQYGYLTLNNGSQAVGRSSFYCLEYFPSQMLRTGNNFTFSYTFEDAPFHSSYAHSQSLDRLMNPLIDQYLYYLNKTNNQSGTFTQSRLLFSQAGPTSILFKSKNWLPGPCYRQQRLSKTANDNNNSNFPWTAATKYHLNGRDSLVNPGPAMASHKDDEEKFFPQHGTLIFGKQGTKLTDADLDNVMITDEEEIRTTNPVATEQYGTVSNNLQKLNILATTGTVNTQGALPGMVWQDRDVYLQGPIWAKIPHTDGHFHPSPLMGGFGLKHPPPQIMIKNTPVPANPPTNFSSAKFASFITQYSTGQVSVEIEWELQKENSKRWNPEIQYTSNYNKSVNVDFTVDTNGVYSEPRPIGTRYLTRNL

SEQ ID NO: 4238 - protein, 735 aa, Artificial Sequence
  Description of Artificial Sequence: Synthetic polypeptide
MAADGYLPDWLEDTLSEGIRQWWKLKPGPPPPKPAERHKDASRGLVLPGYKYLGPFNGLDKGEPVNEADAAALEHDKAYDRQLDSGDNPYLKYNHADAEFQERLKEDTSFGGNLGRAVFQAKKRVLEPLGLVEEPVKTAPGKKRPVEHSPVEPDSSSGTGKAGQQPARKRLNFGQTGDADSVPDPQPLGQPPAAPTSLGSTTMATGSGAPMADNNEGADGVGNSSGNWHCDSQWLGDRVITTSTRTWALPTYNNHLYKQISSQSGASNDNHYFGYSTPWGYFDFNRFHCHFSPRDWQRLINNNWGFRPKRLNFKLFNIQVKEVTQNDGTTTIANNLTSTVQVFTDSEYQLPYVLGSAHQGCLPPFPADVFMVPQYGYLTLNNGSQAVGRSSFYCLEYFPSQMLRTGNNFTFSYTFEDVPFHSSYAHSQSLDRLMNPLIDQYLYYLNKTNNQSGTFTQSRLLFSQAGPTSILFKSKNWLPGPCYRQQRLSKTANDNNNSNFPWTAATKYHLNGRDSLVNPGPAMASHKDDEEKFFPMHGTLIFGKQGTKLTDADLDNVMITDEEEIRTTNPVATEQYGTVSNNLQKLNILATTGTVNTQGALPGMVWQDRDVYLQGPIWAKIPHTDGHFHPSPLMGGFGLKHPPPQIMIKNTPVPANPPTNFSSAKFASFITQYSTGQVSVEIEWELQKENSKRWNPEIQYTSNYNKSVNVDFTVDTNGVYSEPRPIGTRYLTRNL

SEQ ID NO: 4239 - protein, 735 aa, Artificial Sequence
  Description of Artificial Sequence: Synthetic polypeptide
MAADGYLPDWLEDTLSEGIRQWWKLKPGPPPPKPAERHKDDSRGLVLPGYKYLGPFNGLDKGEPVNEADAAALEHDKAYDRQLDSGDNPYLKYNHADAEFQERLKEDTSFGGNLGRAVFQAKKRVLEPLGLVEEPVKTAPGKKRPVEHSPVEPDSSSGTGKAGQQPARKRLNFGQTGDADSVPDPQPLGQPPAAPSGLGTNTMATGSGAPMADNNEGADGVGNSSGNWHCDSTWMGDRVITTSTRTWALPTYNNHLYKQISSQSGASNDNHYFGYSTPWGYFDFNRFHCHFSPRDWQRLINNNWGFRPKRLNFKLFNIQVKEVTQNDGTTTIANNLTSTVQVFTDSEYQLPYVLGSAHQGCLPPFPADVFMVPQYGYLTLNNGSQAVGRSSFYCLEYFPSQMLRTGNNFTFSYTFEDVPFHSSYAHSQSLDRLMNPLIDQYLYYLNKTNNQSGTFTQSRLLFSQAGPTSILFKSKNWLPGPCYRQQRLSKTANDNNNSNFPWTAATKYHLNGRDSLVNPGPAMASHKDDEEKFFPQHGTLIFGKQGTKLTDADLDNVMITDEEEIRTTNPVATEQYGTVSNNLQKLNILATTGTVNTQGALPGMVWQDRDVYLQGPIWAKIPHTDGHFHPSPLMGGFGLKHPPPQIMIKNTPVPANPPTNFSSAKFASFITQYSTGQVSVEIEWELQKENSKRWNPEIQYTSNYNKSVNVDFTVDTNGVYSEPRPIGTRYLTRNL

SEQ ID NO: 4240 - protein, 735 aa, Artificial Sequence
  Description of Artificial Sequence: Synthetic polypeptide
MAADGYLPDWLEDTLSEGIRQWWKLKPGPPPPKPAERHKDDSRGLVLPGYKYLGPFNGLDKGEPVNEADAAALEHDKAYDRQLDSGDNPYLKYNHADAEFQERLKEDTSFGGNLGRAVFQAKKRVLEPLGLVEEPVKTAPGKKRPVEHSPVEPDSSSGTGKAGQQPARKRLNFGQTGDADSVPDPQPLGQPPAAPTSLGSTTMATGSGAPMADNNEGADGVGNSSGNWHCDSQWLGDRVITTSTRTWALPTYNNHLYKQISSQSGASNDNHYFGHSTPWGYFDFNRFHCHFSPRDWQRLINNNWGFRPKRLNFKLFNIQVKEVTQNDGTTTIANNLTSTVQVFTDSEYQLPYVLGSAHQGCLPPFPADVFMVPQYGYLTLNNGSQAVGRSSFYCLEYFPSQMLRTGNNFTFSYTFEDVPFHSSYAHSQSLDRLMNPLIDQYLYYLNKTNNQSGTFTQSRLLFSQAGPTSILFKSKNWLPGPCYRQQRLSKTANDNNNSNFPWTAATKYHLNGRDSLVNPGPAMASHKDDEEKFFPMHGTLIFGKQGTKLTDADLDNVMITDEEEIRTTNPVATEQYGTVSNNLQKLNILATTGTVNTQGALPGMVWQDRDVYLQGPIWAKIPHTDGHFHPSPLMGGFGLKHPPPQIMIKNTPVPANPPTNFSSAKFASFITQYSTGQVSVEIEWELQKENSKRWNPEIQYTSNYNKSVNVDFTVDTNGVYSEPRPIGTRYLTRNL

SEQ ID NO: 4241 - protein, 735 aa, Artificial Sequence
  Description of Artificial Sequence: Synthetic polypeptide
MAADGYLPDWLEDTLSEGIRQWWKLKPGPPPPKPAERHKDDSRGLVLPGYKYLGPFNGLDKGEPVNEADAAALEHDKAYDRQLDSGDNPYLKYNHADAEFQERLKEDTSFGGNLGRAVFQAKKRVLEPLGLVEEPVKTAPGKKRPVEHSPVEPDSSSGTGKAGQQPARKRLNFGQTGDADSVPDPQPLGQPPAAPTSLGSTTMATGSGAPMADNNEGADGVGNSSGNWHCDSQWLGDRVITTSTRTWALPTYNNHLYKQISSQSGASNDNHYFGYSTPWGYFDFNRFHCHFSPRDWQRLINNNWGFRPKRLNFKLFNIQVKEVTQNDGTTTIANNLTSTVQVFTDSEYQLPYVLGSAHQGCLPPFPADVFMVPQYGYLTLNNGSQAVGRSSFYCLEYFPSQMLRTGNNFTFSYTFEDVPFHSSYAHSQSLDRLMNPLIDQYLYYLNKTNNQSGTFTQSRLLFSQAGPTSILFKSKNWLPGPCYRQQRLSKTANDNNNSNFPWTAATKYHLNGRDSLVNPGPAMASHKDDEEKFFPQHGTLIFGKQGTKLTDADLDNVMITDEEEIRTTNPVATEQYGTVSNNLQKLNILATTGTVNTQGALPGMVWQDRDVYLQGPIWAKIPHTDGHFHPSPLMGGFGLKHPPPQIMIKNTPVPANPPTNFSSAKFASFITQYSTGQVSVEIEWELQKENSKRWNPEIQYTSNYNKSVNVDFTVDTNGVYSEPRPIGTRYLTRNL

SEQ ID NO: 4242 - protein, 735 aa, Artificial Sequence
  Description of Artificial Sequence: Synthetic polypeptide
MAADGYLPDWLEDTLSEGIRQWWKLKPGPPPPKPAERHKDASRGLVLPGYKYLGPFNGLDKGEPVNEADAAALEHDKAYDRQLDSGDNPYLKYNHADAEFQERLKEDTPFGGNLGRAVFQAKKRVLEPLGLVEEPVKTAPGKKRPVEHSPVEPDSSSGTGKAGQRPARKRLNFGQTGDADSVPDPQPLGQPPAAPTSLGSTTMATGSGAPMADNNEGADGVGNSSGNWHCDSQWLGDRVITTSTRTWALPTYNNHLYKQIPSQSGASNDNHYFGYSTPWGYFDFNRFHCHFSPRDWQRLINNNWGFRPKRLNFKLFNIQVKEVTQNDGTTTIANNLTSTVQVFTDSEYQLPYVLGSAHQGCLPPFPADVFMVPQYGYLTLNNGSQAVGRSSFYCLEYFPSQMLRTGNNFTFSYTFEDVPFHSSYAHSQSLDRLMNPLIDQYLYYLNKTNNQSGTFTQSRLLFSQAGPTSILFKSKNWLPGPCYRQQRLSKTANDNNNSNFPWTAATKYHLNGRDSLVNPGPAMASHKDDEEKFFPQHGTLIFGKQGTKLTDADLDNVMITDEEEIRTTNPVATEQYGTVSNNLQKLNILATTGTVNTQGALPGMVWQDRDVYLQGPIWAKIPHTDGHFHPSPLMGGFGLKHPPPQIMIKNTPVPANPPTNFSSAKFASFITQYSTGQVSVEIEWELQKENSKRWNPEIQYTSNYNKSVNVDFTVDTNGVYSEPRPIGTRYLTRNL

SEQ ID NO: 4243 - protein, 735 aa, Artificial Sequence
  Description of Artificial Sequence: Synthetic polypeptide
MAADGYLPDWLEDTLSEGIRQWWKLKPGPPPPKPAERHKDDSRGLVLPGYKYLGPFNGLDKGEPVNEADAAALEHDKAYDRQLDSGDNPYLKYNHADAEFQERLKEDTSFGGNLGRAVFQAKKRVLEPLGLVEEPVKTAPGKKRPVEHSPVEPDSSSGTGKAGQQPARKRLNFGQTGDADSVPDPQPLGQPPAAPSGLGTNTMATGSGAPMADNNEGADGVGNSSGNWHCDSTWMGDRVITTSTRTWALPTYNNHLYKQISSQSGASNDNHYFGYSTPWGYFDFNRFHCHFSPRDWQRLINNNWGFRPKRLNFKLFNIQVKEVTQNDGTTTIANNLTSTVQVFTDSEYQLPYVLGSAHQGCLPPFPADVFMVPQYGYLTLNNGSQAVGRSSFYCLEYFPSQMLRTGNNFTFSYTFEDAPFHSSYAHSQSLDRLMNPLIDQYLYYLNKTNNQSGTFTQSRLLFSQAGPTSILFKSKNWLPGPCYRQQRLSKTANDNNNSNFPWTAATKYHLNGRDSLVNPGPAMASHKDDEEKFFPQHGTLIFGKQGTKLTDADLDNVMITDEEEIRTTNPVATEQYGTVSNNLQKLNILATTGTVNTQGALPGMVWQDRDVYLQGPIWAKIPHTDGHFHPSPLMGGFGLKHPPPQIMIKNTPVPANPPTNFSSAKFASFITQYSTGQVSVEIEWELQKENSKRWNPEIQYTSNYNKSVNVDFTVDTNGVYSEPRPIGTRYLTRNL

SEQ ID NO: 4244 - protein, 735 aa, Artificial Sequence
  Description of Artificial Sequence: Synthetic polypeptide
MAADGYLPDWLEDILSEGIRQWWKLKPGPPPPKPAERHKDASRGLVLPGYKYLGPFNGLDKGEPVNEADAAALEHDKAYDRQLDSGDNPYLKYNHADAEFQERLKEDTSFGGNLGRAVFQAKKRVLEPLGLVEEPVKTAPGKKRPVEHSPVEPDSSSGTGKAGQQPARKRLNFGQTGDADSVPDPQPLGQPPAAPTSLGSTTMATGSGAPMADNNEGADGVGNSSGNWHCDSQWLGDRVITTSTRTWALPTYNNHLYKQISSQSGASNDNHYFGYSTPWGYFDFNRFHCHFSPRDWQRLINNNWGFRPKRLNFKLFNIQVKEVTQNDGTTTIANNLTSTVQVFTDSEYQLPYVLGSAHQGCLPPFPADVFMVPQYGYLTLNNGSQAVGRSSFYCLEYFPSQMLRTGNNFTFSYTFEDVPFHSSYAHSQSLDRLMNPLIDQYLYYLNKTNNQSGTFTQSRLLFSQAGPTSILFKSKNWLPGPCYRQQRLSKTANDNNNSNFPWTAATKYHLNGRDSLVNPGPAMASHKDDEEKFFPQHGTLIFGKQGTKLTDADLDNVMITDEEEIRTTNPVATEQYGTVSNNLQKLNILATTGTVNTQGALPGMVWQDRDVYLQGPIWAKIPHTDGHFHPSPLMGGFGLKHPPPQIMIKNTPVPANPPTNFSSAKFASFITQYSTGQVSVEIEWELQKENSKRWNPEIQYTSNYNKSVNVDFTVDTNGVYSEPRPIGTRYLTRNL

SEQ ID NO: 4245 - protein, 735 aa, Artificial Sequence
  Description of Artificial Sequence: Synthetic polypeptide
MAADGYLPDWLEDILSEGIRQWWKLKPGPPPPKPAERHKDASRGLVLPGYKYLGPFNGLDKGEPVNEADAAALEHDKAYDRQLDSGDNPYLKYNHADAEFQERLKEDTSFGGNLGRAVFQAKKRVLEPLGLVEEPVKTAPGKKRPVEHSPVEPDSSSGTGKAGQQPARKRLNFGQTGDADSVPDPQPLGQPPAAPTSLGSTTMATGSGAPMADNNEGADGVGNSSGNWHCDSQWLGDRVIATSTRTWALPTYNNHLYKQISSQSGASNDNHYFGYSTPWGYFDFNRFHCHFSPRDWQRLINNNWGFRPKRLNFKLFNIQVKEVTQNDGTTTIANNLTSTVQVFTDSEYQLPYVLGSAHQGCLPPFPADVFMVPQYGYLTLNNGSQAVGRSSFYCLEYFPSQMLRTGNNFTFSYTFEDVPFHSSYAHSQSLDRLMNPLIDQYLYYLNKTNNQSGTFTQSRLLLSQAGPTSILFKSKNWLPGPCYRQQRLSKTANDNNNSNFPWTAATKYHLNGRDSLVNPGPAMASHKDDEEKFFPQHGTLIFGKQGTKLTDADLDNVMITDEEEIRTTNPVATEQYGTVSNNLQKLNILATTGTVNTQGALPGMVWQDRDVYLQGPIWAKIPHTDGHFHPSPLMGGFGLKHPPPQIMIKNTPVPANPPTNFSSAKFASFITQYSTGQVSVEIEWELQKENSKRWNPEIQYTSNYNKSVNVDFTVDTNGVYSEPRPIGTRYLTRNL

SEQ ID NO: 4246 - protein, 735 aa, Artificial Sequence
  Description of Artificial Sequence: Synthetic polypeptide
MAADGYLPDWLEDTLSEGIRQWWKLKPGPPPPKPAERHKDASRGLVLPGYKYLGPFNGLDKGEPVNEADAAALEHDKAYDRQLDSGDNPYLKYNHADAEFQERLKEDTPFGGNLGRAVFQAKKRVLEPLGLVEEPVKTAPGKKRPVEHSPVEPDSSSGTGKAGQQPARKRLNFGQTGDADSVPDPQPLGQPPAAPTSLGSTTMATGSGAPMADNNEGADGVGNSSGNWHCDSQWLGDRVITTSTRTWALPTYNNHLYKQIPSQSGASNDNHYFGYSTPWGYFDFNRFHCHFSPRDWQRLINNNWGFRPKRLNFKLFNIQVKEVTQNDGTTTIANNLTSTVQVFTDSEYQLPYVLGSAHQGCLPPFPADVFMVPQYGYLTLNNGSQAVGRSSFYCLEYFPSQMLRTGNNFTFSYTFEDVPFHSSYAHSQSLDRLMNPLIDQYLYYLNKTNNQSGTFTQSRLLFSQAGPTSILFKSKNWLPGPCYRQQRLSKTANDNNNSNFPWTAATKYHLNGRDSLVNPGPAMASHKDDEEKFFPQHGTLIFGKQGTKLTDADLDNVMITDEEEIRTTNPVATEQYGTVSNNLQKLNILATTGTVNTQGALPGMVWQDRDVYLQGPIWAKIPHTDGHFHPSPLMGGFGLKHPPPQIMIKNTPVPANPPTNFSSAKFASFITQYSTGQVSVEIEWELQKENSKRWNPEIQYTSNYNKSVNVDFTVDTNGVYSEPRPIGTRYLTRNL

SEQ ID NO: 4247 - protein, 735 aa, Artificial Sequence
  Description of Artificial Sequence: Synthetic polypeptide
  MOD_RES (172)..(172): Any naturally occurring amino acid
  MOD_RES (220)..(220): Any naturally occurring amino acid
  MOD_RES (367)..(367): Any naturally occurring amino acid
  MOD_RES (499)..(499): Any naturally occurring amino acid
  MOD_RES (558)..(558): Any naturally occurring amino acid
  MOD_RES (590)..(590): Any naturally occurring amino acid
  MOD_RES (597)..(597): Any naturally occurring amino acid
MAADGYLPDWLEDTLSEGIRQWWKLKPGPPPPKPAERHKDDSRGLVLPGYKYLGPFNGLDKGEPVNEADAAALEHDKAYDRQLDSGDNPYLKYNHADAEFQERLKEDTSFGGNLGRAVFQAKKRVLEPLGLVEEPVKTAPGKKRPVEHSPVEPDSSSGTGKAGQQPARKRLXFGQTGDADSVPDPQPLGQPPAAPSGLGTNTMATGSGAPMADNNEGADXVGNSSGNWHCDSTWMGDRVITTSTRTWALPTYNNHLYKQISSQSGASNDNHYFGYSTPWGYFDFNRFHCHFSPRDWQRLINNNWGFRPKRLNFKLFNIQVKEVTQNDGTTTIANNLTSTVQVFTDSEYQLPYVLGSAHQGCLPPFPXDVFMVPQYGYLTLNNGSQAVGRSSFYCLEYFPSQMLRTGNNFTFSYTFEDVPFHSSYAHSQSLDRLMNPLIDQYLYYLNKTNNQSGTFTQSRLLFSQAGPTSILFKSKNWLPGPCYRQQRLSKTANDNNNSXFPWTAATKYHLNGRDSLVNPGPAMASHKDDEEKFFPMHGTLIFGKQGTKLTDADLDNVXITDEEEIRTTNPVATEQYGTVSNNLQKLNILXTTGTVNXQGALPGMVWQDRDVYLQGPIWAKIPHTDGHFHPSPLMGGFGLKHPPPQIMIKNTPVPANPPTNFSYAKFASFITQYSTGQVSVEMEWELQKENSKRWNPEIPYTSKYNKSVNVDFTVDTNGVYSEPRPIGTRYLTRNL

SEQ ID NO: 4248 - protein, 735 aa, Artificial Sequence
  Description of Artificial Sequence: Synthetic polypeptide
MAADGYLPDWLEDTLSEGIRQWWKLKPGPPPPKPAERHQDDSRGLVLPGYKYLGPFNGLDKGEPVNEADAAALEHDKAYDRQLDSGDNPYLKYNHADAEFQERLKEDTSFGGNLGRAVFQAKKRVLEPLGLVEEPVKTAPGKKRPVEHSPAEPDSSSGTGKAGQQPARKRLNFGQTGDADSVPDPQPLGQPPAAPTSLGSTTMATGSGAPMADNNEGADGVGNSSGNWHCDSQWLGDRVITTSTRTWALPTYNNHLYKQISSQSGASNDNHYFGYSTPWGYFDFNRFHCHFSPRDWQRLINNNWGFRPKRLNFKLFNIQVKEVTQNDGTTTIANNLTSTVQVFTDSEYQLPYVLGSAHQGCLPPFPADVFMVPQYGYLTLNNGSQAVGRSSFYCLEYFPSQMLRTGNNFTFSYTFEDVPFHSSYAHSQSLDRLMNPLIDQYLYYLNRTQSNSGTLQQSRLLFSQAGPTSMSLQAKNWLPGPCYRQQRLSKQANDNNNSNFPWTAATKYHLNGRDSLVNPGPAMASHKDDEEKFFPMHGTLIFGKQGTNANDADLEHVMITDEEEIRTTNPVATEQYGNVSNNLQNSNTGPTTENVNHQGALPGMVWQDRDVYLQGPIWAKIPHTDGHFHPSPLMGGFGLKHPPPQIMIKNTPVPANPPTNFSAAKFASFITQYSTGQASVEIEWELQKENSKRWNPEIQYTSNYNKSVNVDFTVDTNGVYSEPRPIGTRYLTRNL

SEQ ID NO: 4249 - protein, 735 aa, Artificial Sequence
  Description of Artificial Sequence: Synthetic polypeptide
MAADGYLPDWLEDTLSEGIRQWWKLKPGPPPPKPAERHKDDSRGLVLPGYKYLGPFNGLDKGEPVNEADAAALEHDKAYDRQLDSGDNPYLKYNHADAEFQERLKEDTSFGGNLGRAVFQAKKRVLEPLGLVEEPVKTAPGKKRPVEHSPVEPDSSSGTGKAGQQPARKRLNFGQTGDADSVPDPQPLGQPPAAPTSLGSTTMATGSGAPMADNNEGADGVGNSSGNWHCDSQWLGDRVITTSTRTWALPTYNNHLYKQISSQSGASNDNHYFGHSTPWGYFDFNRFHCHFSPRDWQRLINNNWGFRPKRLNFKLFNIQVKEVTQNDGTTTIANNLTSTVQVFTDSEYQLPYVLGSAHQGCLPPFPADVFMVPQYGYLTLNNGSQAVGRSSFYCLEYFPSQMLRTGNNFTFSYTFEDVPFHSSYAHSQSLDRLMNPLIDQYLYYLNKTQSNSGTLQQSRLLFSQAGPTSMPLQAKNWLPGPCYRQQRLSKQANDNNNSNFPWTAATKYHLNGRDSLVNPGPAMASHKDDEEKFFPMHGTLIFGKQGTNANDADLDNVMITDEEEIRTTNPVATEQYGTVSNNLQNSNTGPTTGTVNHQGALPGMVWQDRDVYLQGPIWAKIPHTDGHFHPSPLMGGFGLKHPPPQIMIKNTPVPANPPTNFSSAKFASFITQYSTGQVSVEIEWELQKENSKRWNPEIQYTSNYNKSVNVDFTVDTNGVYSEPRPIGTRYLTRNL

SEQ ID NO: 4250 - protein, 735 aa, Artificial Sequence
  Description of Artificial Sequence: Synthetic polypeptide
MAADGYLPDWLEDTLSEGIRQWWKLKPGPPPPKPAERHKDDSRGLVLPGYKYLGPFNGLDKGEPVNEADAAALEHDKAYDRQLDSGDNPYLKYNHADAEFQERLKEDTSFGGNLGRAVFQAKKRVLEPLGLVEEPVKTAPGKKRPVEHSPVEPDSSSGTGKAGQQPARKRLNFGQTGDADSVPDPQPLGQPPAAPTSLGSTTMATGSGAPMADNNEGADGVGNSSGNWHCDSQWLGDRVITTSTRTWALPTYNNHLYKQISSQSGASNDNHYFGHSTPWGYFDFNRFHCHFSPRDWQRLINNNWGFRPKRLNFKLFNIQVKEVTQNDGTTTIANNLTSTVQVFTDSEYQLPYVLGSAHQGCLPPFPADVFMVPQYGYLTLNNGSQAVGRSSFYCLEYFPSQMLRTGNNFTFSYTFEDVPFHSSYAHSQSLDRLMNPLIDQYLYYLNKTQSNSGTLQQSRLLFSQAGPTSMSLQAKNWLPGPCYRQQRLSKQANDNNNSNFPWTAATKYHLNGRDSLVNPGPAMASHKDDEEKFFPMHGTLIFGKQGTNANDADLDNVMITDEEEIRTTNPVATEQYGTVSNNLQNSNTGPTTGTANHQGALPGMVWQDRDVYLQGPIWAKIPHTDGHFHPSPLMGGFGLKHPPPQIMIKNTPVPANPPTNFSSAKFASFITQYSTGQVSVEIEWELQKENSKRWNPEIQYTSNYNKSVNVDFTVDTNGVYSEPRPIGTRYLTRNL

SEQ ID NO: 4251 - protein, 735 aa, Artificial Sequence
  Description of Artificial Sequence: Synthetic polypeptide
MAADGYLPDWLEDTLSEGIRQWWKLKPGPPPPKPAERHKDDSRGLVLPGYKYLGPFNGLDKGEPVNEADAAALEHDKAYDRQLDSGDNPYLKYNHADAEFQERLKEDTSFGGNLGRAVFQAKKRVLEPLGLVEEPVKTAPGKKRPVEHSPVEPDSSSGTGKAGQQPARKRLNFGQTGDAGSVPDPQPLGQPPAAPTSLGSTTMATGSGAPMADNNEGADGVGNSSGNWHCDSQWLGDRVITTSTRTWALPTYNNHLYKQISSQSGASNDNHYFGHSTPWGYFDFNRFHCHFSPRDWQRLINNNWGFRPKRLNFKLFNIQVKEVTQNDGTTTIANNLTSTVQVFTDSEYQLPYVLGSAHQGCLPPFPADVFMVPQYGYLTLNNGSQAVGRSSFYCLEYFPSQMLRTGNNFTFSYTFEDVPFHSSYAHSQSLDRLMNPLIDQYLYYLNKTQSNSGTLQQSRLLFSQAGPTSMSLQAKNWLPGPCYRQQRLSKQANDNNNSNFPWTAATKYHLNGRDSLVNPGPAMASHKDDEEKFFPMHGTLIFGKQGTNANDADLDNVMITDEEEIRTTNPVATEQYGTVSNNLQNSNTGPTTGTVNHQGALPGMVWQDRDVYLQGPIWAKIPHTDGHFHPSPLMGGFGLKHPPPQIMIKNTPVPANPPTNFSSAKFASFITQYSTGQVSVEIEWELQKENSKRWNPEIQYTSNYNKSVNVDFTVDTNGVYSEPRPIGTRYLTRNL

SEQ ID NO: 4252 - protein, 735 aa, Artificial Sequence
  Description of Artificial Sequence: Synthetic polypeptide
MAADGYLPDWLEDTLSEGIRQWWKLKPGPPPPKPAERHKDDSRGLVLPGYKYLGPFNGLDKGEPVNEADAAALEHDKAYDRQLDSGDNPYLKYNHADAEFQERLKEDTSFGGNLGRAVFQAKKRVLEPLGLVEEPVKTAPGKKRPVEHSPVEPDSSSGTGKAGQQPARKRLNFGQTGDADSVPDPQPLGQPPAAPTSLGSTTMATGSGAPMADNNEGADGVGNSSGNWHCDSQWLDDRVITTSTRTWALPTYNNHLYKQISSQSGASNDNHYFGHSTPWGYFDFNRFHCHFSPRDWQRLINNNWGFRPKRLNFKLFNIQVKEVTQNDGTTTIANNLTSTVQVFTDSEYQLPYVLGSAHQGCLPPFPADVFMVPQYGYLTLNNGSQAVGRSSFYCLEYFPSQMLRTGNNFTFSYTFEDVPFHSSYAHSQSLDRLMNPLIDQYLYYLNKTQSNSGTLQQSRLLFSQAGPTSMSLQAKNWLPGPCYRQQRLSKQANDNNNSNFPWTAATKYHLNGRDSLVNPGPAMASHKDDEEKFFPMHGTLIFGKQGTNANDADLDNVMITDEEEIRTTNPVATEQYGTVSNNLQNSNTGPTTGTVNHQGALPGMVWQDRDVYLQGPIWAKIPHTDGHFHPSPLMGGFGLKHPPPQIMIKNTPVPANPPTNFSSAKFASFITQYSTGQVSVEIEWELQKENSKRWNPEIQYTSNYNKSVNVDFTVDTNGVYSEPRPIGTRYLTRNL

SEQ ID NO: 4253 - protein, 735 aa, Artificial Sequence
  Description of Artificial Sequence: Synthetic polypeptide
MAADGYLPDWLEDTLSEGIRQWWKLKPGPPPPKPAERHKDDSRGLVLPGYKYLGPFNGLDKGEPVNEADAAALEHDKAYDRQLDSGDNPYLKYNHADAEFQERLKEDTSFGGNLGRAVFQAKKRVLEPLGLVEEPVKTAPGKKRPVEHSPVEPGSSSGTGKAGQQPARKRLNFGQTGDADSVPDPQPLGQPPAAPTSLGSTTMATGSGAPMADNNEGADGVGNSSGNWHCDSQWLGDRVITTSTRTWALPTYNNHLYKQISSQSGASNDNHYFGHSTPWGYFDFNRFHCHFSPRDWQRLINNNWGFRPKRLNFKLFNIQVKEVTQNDGTTTIANNLTSTVQVFTDSEYQLPYVLGSAHQGCLPPFPADVFMVPQYGYLTLNNGSQAVGRSSFYCLEYFPSQMLRTGNNFTFSYTFEDVPFHSSYAHSQSLDRLMNPLIDQYLYYLNKTQSNSGTLQQSRLLFSQAGPTSMSLQAKNWLPGPCYRQQRLSKQANDNNNSNFPWTAATKYHLNGRDSLVNPGPAMASHKDDEEKFFPMHGTLIFGKQGTNANDADLDNVMITDEEEIRTTNPVATEQYGTVSNNLQNSNTGPTTGTVNHQGALPGMVWQDRDVYLQGPIWAKIPHTDGHFHPSPLMGGFGLKHPPPQIMIKNTPVPANPPTNFSSAKFASFITQYSTGQVSVEIEWELQKENSKRWNPEIQYTSNYNKSVNVDFTVDTNGVYSEPRPIGTRYLTRNL

SEQ ID NO: 4254 - protein, 735 aa, Artificial Sequence
  Description of Artificial Sequence: Synthetic polypeptide
MAADGYLPDWLEDTLSEGIRQWWKLKPGPPPPKPAERHKDDSRGLVLPGYKYLGPFNGLDKGEPVNEADAAALEHDKAYDRQLDSGDNPYLKYNHADAEFQERLKEDTSFGGNLGRAVFQAKKRVLEPLGLVEEPVKTAPGKKRPVEHSPVEPDSSSGTGKAGQQPARKRLNFGQTGDADSVPDPQPLGQPPAAPTSLGSTTMATGSGAPMADNNEGADGVGNSSGNWHCDSQWLGDRVITTSTRTWALPTYNNHLYKQISSQSGASNDNHYFGHSTPWGYFDFNRFHCHFSPRDWQRLINNNWGFRPKRLNFKLFNIQVKEVTQNDGTTTIANNLTSTVQVFTDSEYQLPYVLGSAHQGCLPPFPADVFMVPQYGYLTLNNGSQAVGRSSFYCLEYFPSQMLRTGNNFTFSYTFEDVPFHSSYAHSQSLDRLMNPLIDQYLYYLNKTQSNSGTLQQSRLLFSQAGPTSMSLQAKNWLPGPCYRQQRLSKQANDNNNSNFPWTAATKYHLNGRDSLVNPGPAMASHKDDEEKFFPMHGTLIFGKQGTNANDADLDNVMITDEEEIRTTNPVATEQYGTVSNNLQNSNTGPTTGTVNHQGALPGMVWQDRDVYLQGPIWAKIPHTDGHFHPSPLMGGFGLKHPPPQIMIKNTPVPANPPTNFSSAKFASFITQYSTGQVSVEIGWELQKENSKRWNPEIQYTSNYNKSVNVDFTVDTNGVYSEPRPIGTRYLTRNL

SEQ ID NO: 4255 - protein, 735 aa, Artificial Sequence
  Description of Artificial Sequence: Synthetic polypeptide
MAADGYLPDWLEDTLSEGIRQWWKLKPGPPPPKPAERHKDDSRGLVLPGYKYLGPFNGLDKGEPVNEADAAALEHDKAYDRQLDSGDNPYLKYNHADAEFQERLKEDTSFGGNLGRAVFQAKKRVLEPLGLVEEPVKTAPGKKRPVEHSPVEPDSSSGTGKAGQQPARKRLNFGQTGDADSVPDPQPLGQPPAAPTSLGSTTMATGSGAPMADNNEGADGVGNSSGNWHCDSQWLGDRVITTSTRTWALPTYNNHLYKQISSQSGASNDNHYFGHSTPWGYFDFNRFHCHFSPRDWQRLINNNWGFRPKRLNFKLFNIQVKEVTQNDGTTTIANNLTSTVQVFTDSEYQLPYVLGSAHQGCLPPFPADVFMVPQYGYLTLNNGSQAVGRSSFYCLEYFPSQMLRTGNNFTFSYTFEDVPFHSSYAHSQSLDRLMNPLIDRYLYYLNKTQSNSGTLQQSRLLFSQAGPTSMSLQAKNWLPGPCYRQQRLSKQANDNNNSNFPWTAATKYHLNGRDSLVNPGPAMASHKDDEEKFFPMHGTLIFGKQGTNANDADLDNVMITDEEEIRTTNPVATEQYGTVSNNLQNSNTGPTTGTVNHQGALPGMVWQDRDVYLQGPIWAKIPHTDGHFHPSPLMGGFGLKHPPPQIMIKNTPVPANPPTNFSSAKFASFITQYSTGQVSVEIEWELQKENSKRWNPEIQYTSNYNKSVNVDFTVDTNGVYSEPRPIGTRYLTRNL

SEQ ID NO: 4256 - protein, 735 aa, Artificial Sequence
  Description of Artificial Sequence: Synthetic polypeptide
MAADGYLPDWLEDTLSEGIRQWWKLKPGPPPPKPAERHKDDSRGLVLPGYKYLGPFNGLDKGEPVNEADAAALEHDKAYDRQLDSGDNPYLKYNHADAEFQERLKEDTSFGGNLGRAVFQAKKRVLEPLGLVEEPVKTAPGKKRPVEHSPVEPDSSSGTGKAGQQPARKRLNFGQTGDADSVPDPQPLGQPPAAPTSLGSTTMATGSGAPMADNNEGADGVGNSSGNWHCDSQWLGDRVITTSTRTWALPTYNNHLYKQISSQSGASNDNHYFGHSTPWGYFDFNRFHCHFSPRDWQRLINNNWGFRPKRLNFKLFNIQVKEVTQNDGTTTIANNLTSTVQVFTDSEYQLPYVLGSAHQGCLPPFPADVFMVPQYGYLTLNNGSQAVGRSSFYCLEYFPSQMLRTGNNFTFSYTFEDVPFHSSYAHSQSLDRLMNPLIDQHLYYLNKTQSNSGTLQQSRLLFSQAGPTSMSLQAKNWLPGPCYRQQRLSKQANDNNNSNFPWTAATKYHLNGRDSLVNPGPAMASHKDDEEKFFPMHGTLIFGKQGTNANDADLDNVMITDEEEIRTTNPVATEQYGTVSNNLQNSNTGPTTGTVNHQGALPGMVWQDRDVYLQGPIWAKIPHTDGHFHPSPLMGGFGLKHPPPQIMIKNTPVPANPPTNFSSAKFASFITQYSTGQVSVEIEWELQKENSKRWNPEIQYTSNYNKSVNVDFTVDTNGVYSEPRPIGTRYLTRNL

SEQ ID NO: 4257 - protein, 735 aa, Artificial Sequence
  Description of Artificial Sequence: Synthetic polypeptide
MAADGYLPDWLEDTLSEGIRQWWKLKPGPPPPKPAERHKDDSRGPVLPGYKYLGPFNGLDKGEPVNEADAAALEHDKAYDRQLDSGDNPYLKYNHADAEFQERLKEDTSFGGNLGRAVFQAKKRVLEPLGLVEEPVKTAPGKKRPVEHSPVEPDSSSGTGKAGQQPARKRLNFGQTGDADSVPDPQPLGQPPAAPTSLGSTTMATGSGAPMADNNEGADGVGNSSGNWHCDSQWLGDRVITTSTRTWALPTYNNHLYKQISSQSGASNDNHYFGHSTPWGYFDFNRFHCHFSPRDWQRLINNNWGFRPKRLNFKLFNIQVKEVTQNDGTTTIANNLTSTVQVFTDSEYQLPYVLGSAHQGCLPPFPADVFMVPQYGYLTLNNGSQAVGRSSFYCLEYFPSQMLRTGNNFTFSYTFEDVPFHSSYAHSQSLDRLMNPLIDQYLYYLNKTQSNSGTLQQSRLLFSQAGPTSMSLQAKNWLPGPCYRQQRLSKQANDNNNSNFPWTAATKYHLNGRDSLVNPGPAMASHKDDEEKFFPMHGTLIFGKQGTNANDADLDNVMITDEEEIRTTNPVATEQYGTVSNNLQNSNTGPTTGTVNHQGALPGMVWQDRDVYLQGPIWAKIPHTDGHFHPSPLMGGFGLKHPPPQIMIKNTPVPANPPTNFSSAKFASFITQYSTGQVSVEIEWELQKENSKRWNPEIQYTSNYNKSVNVDFTVDTNGVYSEPRPIGTRYLTRNL

SEQ ID NO: 4258 - protein, 735 aa, Artificial Sequence
  Description of Artificial Sequence: Synthetic polypeptide
MAADGYLPDWLEDTLSEGIRQWWKLKPGPPPPKPAERHKDDSRGLVLPGYKYLGPFNGLDKGEPVNEAGAAALEHDKAYDRQLDSGDNPYLKYNHADAEFQERLKEDTSFGGNLGRAVFQAKKRVLEPLGLVEEPVKTAPGKKRPVEHSPVEPDSSSGTGKAGQQPARKRLNFGQTGDADSVPDPQPLGQPPAAPTSLGSTTMATGSGAPMADNNEGADGVGNSSGNWHCDSQWLGDRVITTSTRTWALPTYNNHLYKQISSQSGASNDNHYFGHSTPWGYFDFNRFHCHFSPRDWQRLINNNWGFRPKRLNFKLFNIQVKEVTQNDGTTTIANNLTSTVQVFTDSEYQLPYVLGSAHQGCLPPFPADVFMVPQYGYLTLNNGSQAVGRSSFYCLEYFPSQMLRTGNNFTFSYTFEDVPFHSSYAHSQSLDRLMNPLIDQYLYYLNKTQSNSGTLQQSRLLFSQAGPTSMSLQAKNWLPGPCYRQQRLSKQANDNNNSNFPWTAATKYHLNGRDSLVNPGPAMASHKDDEEKFFPMHGTLIFGKQGTNANDADLDNVMITDEEEIRTTNPVATEQYGTVSNNLQNSNTGPTTGTVNHQGALPGMVWQDRDVYLQGPIWAKIPHTDGHFHPSPLMGGFGLKHPPPQIMIKNTPVPANPPTNFSSAKFASFITQYSTGQVSVEIEWELQKENSKRWNPEIQYTSNYNKSVNVDFTVDTNGVYSEPRPIGTRYLTRNL

SEQ ID NO: 4259 - protein, 735 aa, Artificial Sequence
  Description of Artificial Sequence: Synthetic polypeptide
MAADGYLPDWLEDTLSEGIRQWWKLKPGPPPPKPAERHKDDSRGLVLPGYKYLGPFNGLDKGEPVNGADAAALEHDKAYDRQLDSGDNPYLKYNHADAEFQERLKEDTSFGGNLGRAVFQAKKRVLEPLGLVEEPVKTAPGKKRPVEHSPVEPDSSSGTGKAGQQPARKRLNFGQTGDADSVPDPQPLGQPPAAPTSLGSTTMATGSGAPMADNNEGADGVGNSSGNWHCDSQWLGDRVITTSTRTWALPTYNNHLYKQISSQSGASNDNHYFGHSTPWGYFDFNRFHCHFSPRDWQRLINNNWGFRPKRLNFKLFNIQVKEVTQNDGTTTIANNLTSTVQVFTDSEYQLPYVLGSAHQGCLPPFPADVFMVPQYGYLTLNNGSQAVGRSSFYCLEYFPSQMLRTGNNFTFSYTFEDVPFHSSYAHSQSLDRLMNPLIDQYLYYLNKTQSNSGTLQQSRLLFSQAGPTSMSLQAKNWLPGPCYRQQRLSKQANDNNNSNFPWTAATKYHLNGRDSLVNPGPAMASHKDDEEKFFPMHGTLIFGKQGTNANDADLDNVMITDEEEIRTTNPVATEQYGTVSNNLQNSNTGPTTGTVNHQGALPGMVWQDRDVYLQGPIWAKIPHTDGHFHPSPLMGGFGLKHPPPQIMIKNTPVPANPPTNFSSAKFASFITQYSTGQVSVEIEWELQKENSKRWNPEIQYTSNYNKSVNVDFTVDTNGVYSEPRPIGTRYLTRNL

SEQ ID NO: 4260 - protein, 735 aa, Artificial Sequence
  Description of Artificial Sequence: Synthetic polypeptide
MAADGYLPDWLEDTLSEGIRQWWKLKPGPPPPKPAERHKDDSRGLVLPGYKYLGPFNGLDKGEPVNEADAAALEHDKAYDRQLDSGDNPYLKYNHADAEFQERLKEDTSFGGNLGRAVFQAKKRVLEPLGLVEEPVKTAPGKKRPVEHSPVEPDSSSGTGKAGQQPARKRLNFGQTGDADSVPDPQPLGQPPAAPTSLGSTTMATGSGAPMADNNEGADGVGNSSGNWHCDSQWLGDRVITTSTRTWALPTYNNHLYKQISSQSGASNDNHYFGHSTPWGYFDFNRFHCHFSPRDWQRLINNNWGFRPKRLNFKLFNIQVKEVTQNDGTTTIANNLTSTVQVFTDSEYQLPYVLGSAHQGCLPPFPADVFMVPQYGYLTLNNGSQAVGRSSLYCLEYFPSQMLRTGNNFTFSYTFEDVPFHSSYAHSQSLDRLMNPLIDQYLYYLNKTQSNSGTLQQSRLLFSQAGPTSMSLQAKNWLPGPCYRQQRLSKQANDNNNSNFPWTAATKYHLNGRDSLVNPGPAMASHKDDEEKFFPMHGTLIFGKQGTNANDADLDNVMITDEEEIRTTNPVATEQYGTVSNNLQNSNTGPTTGTVNHQGALPGMVWQDRDVYLQGPIWAKIPHTDGHFHPSPLMGGFGLKHPPPQIMIKNTPVPANPPTNFSSAKFASFITQYSTGQVSVEIEWELQKENSKRWNPEIQYTSNYNKSVNVDFTVDTNGVYSEPRPIGTRYLTRNL

SEQ ID NO: 4261 - protein, 735 aa, Artificial Sequence
  Description of Artificial Sequence: Synthetic polypeptide
MAADGYLPDWLEDTLSEGIRQWWKLKPGPPPPKPAERHKDDSRGLVLPGYKYLGPFNGLDKGEPVNEADAAALEHDKAYDRQLDSGDNPYLKYNHADAEFQERLKEDTSFGGNLGRAVFQAKKRVLEPLGLVEEPVKTAPGKKRPVEHSPVEPDSSSGTGKAGQQPARKRLNFGQTGDADSVPDPQPLGQPPAAPTSLGSTTMATGSGAPMADNNEGADGVGNSSGNWHCDSQWLGDRVITTSTRTWALPTYNNHLYKQISSQSGASNDNHYFGHSTPWGYFDFNRFHCHFSPRDWQRLINNNWGFRPKRLNFKLFNIQVKEVTQNDGTTTIANNLTSTVQVFTDSEYQLPYVLGSAHQGCLPPFPADVFMVPQYGYLTLNNGSQAVGRSSFYCLEYFPSQMLRTGNNFTSSYTFEDVPFHSSYAHSQSLDRLMNPLIDQYLYYLNKTQSNSGTLQQSRLLFSQAGPTSMSLQAKNWLPGPCYRQQRLSKQANDNNNSNFPWTAATKYHLNGRDSLVNPGPAMASHKDDEEKFFPMHGTLIFGKQGTNANDADLDNVMITDEEEIRTTNPVATEQYGTVSNNLQNSNTGPTTGTVNHQGALPGMVWQDRDVYLQGPIWAKIPHTDGHFHPSPLMGGFGLKHPPPQIMIKNTPVPANPPTNFSSAKFASFITQYSTGQVSVEIEWELQKENSKRWNPEIQYTSNYNKSVNVDFTVDTNGVYSEPRPIGTRYLTRNL

SEQ ID NO: 4262 - protein, 735 aa, Artificial Sequence
  Description of Artificial Sequence: Synthetic polypeptide
MAADGYLPDWLEDTLSEGIRQWWKLKPGPPPPKPAERHKDDSRGLVLPGYKYLGPFNGLDKGEPVNEADAAALEHDKAYDRQLDSGDNPYLKYNHADAEFQERLKEDTSFGGNLGRAVFQAKKRVLEPLGLVEEPVKTAPGKKRPVEHSPVEPDSSSGTGKAGQQPARKRLNFGQTGDADSVPDPQPLGQPPAAPTSLGSTTMATGSGAPMADNNEGADGVGNSSGNWHCDSQWLGDGVITTSTRTWALPTYNNHLYKQISSQSGASNDNHYFGHSTPWGYFDFNRFHCHFSPRDWQRLINNNWGFRPKRLNFKLFNIQVKEVTQNDGTTTIANNLTSTVQVFTDSEYQLPYVLGSAHQGCLPPFPADVFMVPQYGYLTLNNGSQAVGRSSFYCLEYFPSQMLRTGNNFTFSYTFEDVPFHSSYAHSQSLDRLMNPLIDQYLYYLNKTQSNSGTLQQSRLLFSQAGPTSMSLQAKNWLPGPCYRQQRLSKQANDNNNSNFPWTAATKYHLNGRDSLVNPGPAMASHKDDEEKFFPMHGTLIFGKQGTNANDADLDNVMITDEEEIRTTNPVATEQYGTVSNNLQNSNTGPTTGTVNHQGALPGMVWQDRDVYLQGPIWAKIPHTDGHFHPSPLMGGFGLKHPPPQIMIKNTPVPANPPTNFSSAKFASFITQYSTGQVSVEIEWELQKENSKRWNPEIQYTSNYNKSVNVDFTVDTNGVYSEPRPIGTRYLTRNL

SEQ ID NO: 4263 - protein, 735 aa, Artificial Sequence
  Description of Artificial Sequence: Synthetic polypeptide
MAADGYLPDWLEDTLSEGIRQWWKLKPGPPPPKPAERHKDDSRGLVLPGYKYLGPFNGLDKGEPVNEADAAALEHDKAYDRQLDSGDNPYLKYNHADAEFQERLKEDTSFGGNLGRAVFQAKKRVLEPLGLVEEPVKTAPGKKRPVEHSPVEPDSSSGTGKAGQQPARKRLNFGQTGDADSVPDPQPLGQPPAAPTSLGSTTMATGSGAPMADNNEGADGVGNSSGNWHCDSQWLGDRVITTSTRTWALPTYNNHLYKQISSQSGASNDNHYFGHSTPWGYFDFNRFHCHFSPRDWQRLINNNWGFRPKRLNFKLFNIQVKEVTQNDGTTTIANNLTSTVQVFTDSEYQLPYVLGSAHQGCLPPFPADVFMVPQYGYLTLNNGSQAVGRSSFYCLEYFPSQMLRTGNNFTFSYTFEDVPFHSSYAHSQSLDRLMNPLIDQYLYYLNKTQSNSGTLQQSRLLFSQAGPTSMSLQAKNWLPGPCYRQQRLSKQANDNNNSNFPWTAATKYHLNGRDSLVNPGPAMASHKDDEEKFFPMHGTLIFGKQGTNANDADLDNVMITDEEEIRTTNPVATEQYRTVSNNLQNSNTGPTTGTVNHQGALPGMVWQDRDVYLQGPIWAKIPHTDGHFHPSPLMGGFGLKHPPPQIMIKNTPVPANPPTNFSSAKFASFITQYSTGQVSVEIEWELQKENSKRWNPEIQYTSNYNKSVNVDFTVDTNGVYSEPRPIGTRYLTRNL

SEQ ID NO: 4264 - protein, 735 aa, Artificial Sequence
  Description of Artificial Sequence: Synthetic polypeptide
MAADGYLPDWLEDTLSEGIRQWWKLKPGPPPPKPAERHKDDSRGLVLPGYKYLGPFNGLDKGEPVNEADAAALEHDKAYDRQLDSGDNPYLKYNHADAEFQERLKEDTSFGGNLGRAVFQAKKRVLEPLGLVEEPVKTAPGKKRPVEHSPVEPDSSSGTGKAGQQPARKRLNFGQTGDADSVPDPQPLGQPPAAPTSLGSTTMATGSGAPMADNNEGADGVGNSSGNWHCDSQWLGDRVITTSTRTWALPTYNNHLYKQISSQSGASNDNHYFGHSTPWGYFDFNRFHCHFSPRDWQRLINNNWGFRPKRLNFKLFNIQVKEVTQNDGTTTIANNLTSTVRVFTDSEYQLPYVLGSAHQGCLPPFPADVFMVPQYGYLTLNNGSQAVGRSSFYCLEYFPSQMLRTGNNFTFSYTFEDVPFHSSYAHSQSLDRLMNPLIDQYLYYLNKTQSNSGTLQQSRLLFSQAGPTSMSLQAKNWLPGPCYRQQRLSKQANDNNNSNFPWTAATKYHLNGRDSLVNPGPAMASHKDDEEKFFPMHGTLIFGKQGTNANDADLDNVMITDEEEIRTTNPVATEQYGTVSNNLQNSNTGPTTGTVNHQGALPGMVWQDRDVYLQGPIWAKIPHTDGHFHPSPLMGGFGLKHPPPQIMIKNTPVPANPPTNFSSAKFASFITQYSTGQVSVEIEWELQKENSKRWNPEIQYTSNYNKSVNVDFTVDTNGVYSEPRPIGTRYLTRNL

SEQ ID NO: 4265 - protein, 735 aa, Artificial Sequence
  Description of Artificial Sequence: Synthetic polypeptide
MAADGYLPDWLEDTLSEGIRQWWKLKPGPPPPKPAERHKDDSRGLVLPGYKYLGPFNGLDKGEPVNEADAAALEHDKAYDRQLDSGDNPYLKYNHADAEFQERLKEDTSFGGNLGRAVFQAKKRVLEPLGLVEEPVKTAPGKKRPVEHSPVEPDSSSGTGKAGQQPARKRLNFGQTGDADSVPDPQPLGQPPAAPTSLGSTTMATGSGAPMADNNEGADGVGNSSGNWHCDSQWLGDRVITTSTRTWALPTYNNHLYKQISSQSGASNDNHYFGHSTPWGYFDFNRFHCHFSPRDWQRLINNNWGFRPKRLNFKLFNIQVKEVTQNDGTTTIANNLTSTVQVFTDSEYQLPYVLGSAHQGCLPPFPADVFMVPQYGYLTLNNGSQAVGRSSFYCLEYFPSQMLRTGNNFTFSYTFEDVPFHSSYAHSQSLDRLMNPLIDQYLYYLNKTQSNSGTLRQSRLLFSQAGPTSMSLQAKNWLPGPCYRQQRLSKQANDNNNSNFPWTAATKYHLNGRDSLVNPGPAMASHKDDEEKFFPMHGTLIFGKQGTNANDADLDNVMITDEEEIRTTNPVATEQYGTVSNNLQNSNTGPTTGTVNHQGALPGMVWQDRDVYLQGPIWAKIPHTDGHFHPSPLMGGFGLKHPPPQIMIKNTPVPANPPTNFSSAKFASFITQYSTGQVSVEIEWELQKENSKRWNPEIQYTSNYNKSVNVDFTVDTNGVYSEPRPIGTRYLTRNL

SEQ ID NO: 4266 - protein, 735 aa, Artificial Sequence
  Description of Artificial Sequence: Synthetic polypeptide
MAADGYLPDWLEDTLSEGIRQWWKLKPGPPPPKPAERHKDDSRGLVLPGYKYLGPFNGLDKGEPVNEADAAALEHDKAYDRQLDSGDNPYLKYNHADAEFQERLKEDTSFGGNLGRAVFQAKKRVLEPLGLVEEPVKTAPGKKRPVEHSPVEPDSSSGTGKAGQQPARKRLNFGQTGDADSVPDPQPLGQPPAAPTSLGSTTMATGSGAPMADNNEGADGVGNSSGNWHCDSQWLGDRVITTSTRTWALPTYNNHLYKQISSQSGASNDNHYFGHSTPWGYFDFNRFHCHFSPRDWQRLINNNWGFRPKRLNFKLFNIQVKEVTQNDGTTTIANNLTSTVQVFTDSEYQLPYVLGSAHQGCLPPFPADVFMVPQYGYLTLNNGSQAVGRSSFYCLEYFPSQMLRTGNNFTFSYTFEDVPFHSSYAHSQSLDRLMNPLIDQYLYYLNKTQSNSGTLQQSRLLFSQAGPTSMSLQAKNWLPGPCYRQQRLSKQANDNNNSNFPWTAATKYHLNGRDSLVNPGPAMASHKDDEEKFFPMHGTLIFGKQGTNANDADLDNVMITDEEEIRTTNPVATEQYGTVSNNLQNSNTGPTTGTVNRQGALPGMVWQDRDVYLQGPIWAKIPHTDGHFHPSPLMGGFGLKHPPPQIMIKNTPVPANPPTNFSSAKFASFITQYSTGQVSVEIEWELQKENSKRWNPEIQYTSNYNKSVNVDFTVDTNGVYSEPRPIGTRYLTRNL

SEQ ID NO: 4267 - protein, 735 aa, Artificial Sequence
  Description of Artificial Sequence: Synthetic polypeptide
MAADGYLPDWLEDTLSEGIRQWWKLKPGPPPPKPAERHKDDSRGLVLPGYKYLGPFNGLDKGEPVNEADAAALEHDKAYDRQLDSGDNPYLKYNHADAEFQERLKEDTSFGGNLGRAVFQAKKRVLEPLGLVEEPVKTAPGKKRPVEHSPVEPDSSSGTGKAGQQPARKRLNFGQTGDADSVPDPQPLGQPPAAPTSLGSTTMATGSGAPMADNNEGADGVGNSSGNWHCDSQWLGDRVITTSTRTWALPTYNNHLYKQISSQSGASNDNHYFGHSTPWGYFDFNRFHCHFSPRDWQRLINNNWGFRPKRLNFKLFNIQVKEVTQNDGTTTIANNLTSTVQVFTDSEYQLPYVLGSAHQGCLPPFPADVFMVPQYGYLTLNNGSQAVGRSSFYCLEYFPSQMLRTGNNFTFSYTFEDVPFHSSYAHSQSLDRLMNPLIDQYLYYLNKTQSNSGTLQQSRLLFSQAGPTSMSLQAKNWLPGPCYRQQRLSKQANDNNNGNFPWTAATKYHLNGRDSLVNPGPAMASHKDDEEKFFPMHGTLIFGKQGTNANDADLDNVMITDEEEIRTTNPVATEQYGTVSNNLQNSNTGPTTGTVNHQGALPGMVWQDRDVYLQGPIWAKIPHTDGHFHPSPLMGGFGLKHPPPQIMIKNTPVPANPPTNFSSAKFASFITQYSTGQVSVEIEWELQKENSKRWNPEIQYTSNYNKSVNVDFTVDTNGVYSEPRPIGTRYLTRNL

SEQ ID NO: 4268 - protein, 735 aa, Artificial Sequence
  Description of Artificial Sequence: Synthetic polypeptide
MAADGYLPDWLEDTLSEGIRQWWKLKPGPPPPKPAERHKDDSRGLVLPGYKYLGPFNGLDKGEPVNEADAAALEHDKAYDRQLDSGDNPYLKYNHADAEFQERLKEDTSFGGNLGRAVFQAKKRVLEPLGLVEEPVKTAPGKKRPVEHSPVEPDSSSGTGKAGQQPARKRLNFGQTGDADSVPDPQPLGQPPAAPTSLGSTTMATGSGAPMADNNEGADGVGNSSGNWHCDSQWLGDRVITTSTRTWALPTYNNHLYKQISSQSGASNDNHYFGHSTPWGYFDFNRFHCHFSPRDWQRLINNNWGFRPKRLNFKLFNIQVKEVTQNDGTTTIANNLTSTVQVFTDSEYQLPYVLGSAHQGCLPPFPADVFMVPQYGYLTLNNGSQAVGRSSFYCLEYFPSQMLRTGNNFTFSYTFEDVPFHSSYAHSQSLDRLMNPLIDQYLYYLNKTQSNSGTLQQSRLLFSQAGPTSMSLQAKNWLPGPCYRQQRLSKQANDNNNSNFPWTAATKYHLNGRDSLVNPGPAMASHKDDEEKFFPMHGTLIFGKQGTNANDADLDNVMITDEEEIRTTNPVATEQYGTVSNNLQNSNTGPTTGTVNHQGALPGMVWQDRDVYLQGPIWAKIPHTDGHFHPSPLMGGFGLKHPPPQIMIKNTPVPANPPTNFSSAKFASFITQYSTGQVSVEIEWELQKENGKRWNPEIQYTSNYNKSVNVDFTVDTNGVYSEPRPIGTRYLTRNL

SEQ ID NO: 4269 - protein, 735 aa, Artificial Sequence
  Description of Artificial Sequence: Synthetic polypeptide
MAADGYLPDWLEDALSEGIRQWWKLKPGPPPPKPAERHKDDSRGLVLPGYKYLGPFNGLDKGEPVNEADAAALEHDKAYDRQLDSGDNPYLKYNHADAEFQERLKEDTSFGGNLGRAVFQAKKRVLEPLGLVEEPVKTAPGKKRPVEHSPVEPDSSSGTGKAGQQPARKRLNFGQTGDADSVPDPQPLGQPPAAPTSLGSTTMATGSGAPMADNNEGADGVGNSSGNWHCDSQWLGDRVITTSTRTWALPTYNNHLYKQISSQSGASNDNHYFGHSTPWGYFDFNRFHCHFSPRDWQRLINNNWGFRPKRLNFKLFNIQVKEVTQNDGTTTIANNLTSTVQVFTDSEYQLPYVLGSAHQGCLPPFPADVFMVPQYGYLTLNNGSQAVGRSSFYCLEYFPSQMLRTGNNFTFSYTFEDVPFHSSYAHSQSLDRLMNPLIDQYLYYLNKTQSNSGTLQQSRLLFSQAGPTSMSLQAKNWLPGPCYRQQRLSKQANDNNNSNFPWTAATKYHLNGRDSLVNPGPAMASHKDDEEKFFPMHGTLIFGKQGTNANDADLDNVMITDEEEIRTTNPVATEQYGTVSNNLQNSNTGPTTGTVNHQGALPGMVWQDRDVYLQGPIWAKIPHTDGHFHPSPLMGGFGLKHPPPQIMIKNTPVPANPPTNFSSAKFASFITQYSTGQVSVEIEWELQKENSKRWNPEIQYTSNYNKSVNVDFTVDTNGVYSEPRPIGTRYLTRNL

SEQ ID NO: 4270 - protein, 735 aa, Artificial Sequence
  Description of Artificial Sequence: Synthetic polypeptide
MAADGYLPDWLEDTLSEGIRQWWKLKPGPPPPKPAERHKDDSRGLVLPGYKYLGPFNGLDKGEPVNEADAAALEHDKAYDRQLDSGDNPYLKYNHADAEFQERLKEDTPFGGNLGRAVFQAKKRVLEPLGLVEEPVKTAPGKKRPVEHSPVEPDSSSGTGKAGQQPARKRLNFGQTGDADSVPDPQPLGQPPAAPTSLGSTTMATGSGAPMADNNEGADGVGNSSGNWHCDSQWLGDRVITTSTRTWALPTYNNHLYKQISSQSGASNDNHYFGHSTPWGYFDFNRFHCHFSPRDWQRLINNNWGFRPKRLNFKLFNIQVKEVTQNDGTTTIANNLTSTVQVFTDSEYQLPYVLGSAHQGCLPPFPADVFMVPQYGYLTLNNGSQAVGRSSFYCLEYFPSQMLRTGNNFTFSYTFEDVPFHSSYAHSQSLDRLMNPLIDQYLYYLNKTQSNSGTLQQSRLLFSQAGPTSMSLQAKNWLPGPCYRQQRLSKQANDNNNSNFPWTAATKYHLNGRDSLVNPGPAMASHKDDEEKFFPMHGTLIFGKQGTNANDADLDNVMITDEEEIRTTNPVATEQYGTVSNNLQNSNTGPTTGTVNHQGALPGMVWQDRDVYLQGPIWAKIPHTDGHFHPSPLMGGFGLKHPPPQIMIKNTPVPANPPTNFSSAKFASFITQYSTGQVSVEIEWELQKENSKRWNPEIQYTSNYNKSVNVDFTVDTNGVYSEPRPIGTRYLTRNL

SEQ ID NO: 4271 - DNA, 2205 bp, Artificial Sequence
  Description of Artificial Sequence: Synthetic polynucleotide
atggctgccgatggttatcttccagattggctcgaggacactctctctgaaggaataagacagtggtggaagctcaaacctggcccaccaccgccaaagcccgcagagcggcacaaggacgacagtaggggtcttgtgcttcctgggtacaagtacctcggacccttcaacggactcgacaaaggagagccggtcaacgaggcagacgccgcggccctcgagcacgacaaggcctacgaccggcagctcgacagcggagacaacccgtacctcaagtacaaccacgccgacgcggagtttcaggagcgtcttaaagaagatacgtcttttgggggcaacctcggacgagcagtattccaggcgaaaaagagggttcttgaacctctgggcctggttgaggagcctgttaagacggctccgggaaaaaagaggccggtagagcactctcctgtggagccagactcctcctcgggaaccggaaaggcgggccagcagcctgcaagaaaaagattgaattttggtcagactggagacgcagactcagtacctgacccccagcctctcggacagccaccagcagccccctctggtctgggaactaatacgatggctacaggcagtggcgcaccaatggcagacaataacgagggcgccgacggagtgggtaattcctcgggaaattggcattgcgattccacatggatgggcgacagagtcatcaccaccagcacccgaacctgggccctgcccacctacaacaaccacctctacaaacaaatttccagccaatcaggagcctcgaacgacaatcactactttggctacagcaccccttgggggtattttgacttcaacagattccactgccacttttcaccacgtgactggcaaagactcatcaacaacaactggggattccgacccaagagactcaacttcaagctctttaacattcaagtcaaagaggtcacgcagaatgacggtacgacgacgattgccaataaccttaccagcacggttcaggtgtttactgactcggagtaccagctcccgtacgtcctcggctcggcgcatcaaggatgcctcccgccgttcccagcagacgtcttcatggtgccacagtatggatacctcaccctgaacaacgggagtcaggcagtaggacgctcttcattttactgcctggagtactttccttctcagatgctgcgtaccggaaacaactttaccttcagctacacttttgaggacgttcctttccacagcagctacgctcacagccagagtctggaccgtctcatgaatcctctcatcgaccagtacctgtattacttgagcagaacacactccaatagtggaactcaccagcagtcaaggcttcagttttctcaggccggagcgagcatgtcgggaccagctaggaactggcttcctggaccctgttaccgccagcagcgagtatcaaagcagtctgcggataacaacaacagtgaatactcgtggactggagctaccaagtaccacctcaatggcagagactctctggtgaatccgggcccggccatggcaagccacaaggacgatgaagaaaagtttttcctcatgagcggggttctcatctttgggaagcaaggctcagatgaaaacaatgtggacattgaaaaggtcatgattacagacgaagaggaaatcaggacaaccaatcccgtggctacggagcagtatggttctgtatctaccaacctccaagaggcaaagacaagtccagctaccgcagatgtcaatcaccaaggcgttcttccaggcatggtctggcaggacagagatgtgtaccttcaggggcccatctgggcaaagattccacacacggacggacattttcacccctctcccctcatgggtggattcggacttaaacaccctcctccacagattctcatcaagaacaccccggtacctgcgaatccttcgaccaccttcagtgcggcaaagtttgcttccttcatcacacagtactccacgggacaggccagcgtggagatcgagtgggagctgcagaaggaaaacagcaaacgctggaatcccgaaattcagtacacttccaactacaacaagtctgttaatgtggactttactgtggacactaatggcgtgtattcagagcctcgccccattggcaccagatacctgactcgtaatctgtaa

SEQ ID NO: 4272 - DNA, 2205 bp, Artificial Sequence
  Description of Artificial Sequence: Synthetic polynucleotide
atggctgccgatggttatcttccagattggctcgaggacactctctctgaaggaataagacagtggtggaagctcaaacctggcccaccaccgccaaagcccgcagagcggcacaaggacgacagtaggggtcttgtgcttcctgggtacaagtacctcggacccttcaacggactcgacaaaggagagccggtcaacgaggcagacgccgcggccctcgagcacgacaaggcctacgaccggcagctcgacagcggagacaacccgtacctcaagtacaaccacgccgacgcggagtttcaggagcgtcttaaagaagatacgtcttttgggggcaacctcggacgagcagtattccaggcgaaaaagagggttcttgaacctctgggcctggttgaggagcctgttaagacggctccgggaaaaaagaggccggtagagcactctcctgtggagccagactcctcctcgggaaccggaaaagcgggccagcagcctgcaagaaaaagattgaattttggtcagactggagacgcagactccgtacctgacccccagcctctcggacagccaccagcagcccccacaagtttgggatctactacaatggctacaggcagtggcgcaccaatggcagacaataacgagggtgccgatggagtgggtaattcctcaggaaattggcattgcgattcccaatggctgggcgacagagtcatcaccaccagcacccgaacctgggccctgcccacctacaacaaccacctctacaagcaaatctccagccaatcaggagcatcgaacgacaaccactactttggccacagcaccccttgggggtattttgacttcaacagattccactgtcacttctccccacgtgactggcaaagactcatcaacaacaactggggattccgacccaagagactcaacttcaagctctttaacattcaagtcaaagaggtcacgcagaatgacggtacgacgacgattgccaataaccttaccagcacggttcaggtgtttactgactcggagtaccagctcccgtacgtcctcggctcggcgcatcaaggatgcctcccgccgttcccagcagacgtcttcatggtgccacagtatggatacctcaccctgaacaacgggagtcaggcagtaggacgctcttcattttactgcctggagtacttcccttctcagatgctgcgtaccggaaacaactttaccttcagctacacttttgaggacgttcctttccacagcagctacgctcacagccagagtctggaccgtctcatgaatcctctcatcgaccagtacctgtattacttgagcagaacacactccaatagtggaactcaccagcagtcaaggcttcagttttctcaggccggagcgagcatgtcgggaccagctaggaactggcttcctggaccctgttaccgccagcagcgagtatcaaagcagtctgcggataacaacaacagtgaatactcgtggactggagctaccaagtaccgcctcaatggcagagactctctggtgaatccgggctcggccatggcaagccacaaggacgatgaagaaaagtttttcctcatgagcggggttctcatctttgggaagcaaggctcagatgaaaacaatgtggacattgaaaaggtcatgattacagacgaagaggaaatcaggacaaccaatcccgtggctacggagcagtatggttctgtatctaccaacctccaagaggcaaagacaagtccagctaccgcagatgtcaatcaccaaggcgttcttccaggcatggtctggcaggacagagatgtgtaccttcaggggcccatctgggcaaagattccacacacggacggacattttcacccctctcccctcatgggtggattcggacttaaacaccctcctccacagattctcatcaagaacaccccggtacctgcgaatccttcgaccaccttcagtgcggcaaagtttgcttccttcatcacacagtactccacgggacaggtcagcgtggagatcgagtgggagctgcagaaggaaaacagcaaacgctggaatcccgaaattcagtacacttccaactacaacaagtctgttaatgtggactttactgtggacactaatggcgtgtattcagagcctcgccccattggcaccagatacctgactcgtaatctgtaa

SEQ ID NO: 4273 - DNA, 2205 bp, Artificial Sequence
  Description of Artificial Sequence: Synthetic polynucleotide
atggctgccgatggttatcttccagattggctcgaggacactctctctgaaggaataagacagtggtggaagctcaaacctggcccaccaccgccaaagcccgcagagcggcacaaggacgacagtaggggtcttgtgcttcctgggtacaagtacctcggacccttcaacggactcgacaaaggagagccggtcaacgaggcagacgccgcggccctcgagcacgacaaggcctacgaccggcagctcgacagcggagacaacccgtacctcaagtacaaccacgccgacgcggagtttcaggagcgtcttaaagaagatacgtcttttgggggcaacctcggacgagcagtattccaggcgaaaaagagggttcttgaacctctgggcctggttgaggagcctgttaagacggctccgggaaaaaagaggccggtagagcactctcctgtggagccagactcctcctcgggaaccggaaaggcgggccagcagcctgcaagaaaaagattgaattttggtcagactggagacgcagactcagtacctgacccccagcctctcggacagccaccagcagccccctctggtctgggaactaatacgatggctacaggcagtggcgcaccaatggcagacaataacgagggcgccgacggagtgggtaattcctcgggaaattggcattgcgattccacatggatgggcgacagagtcatcaccaccagcacccgaacctgggccctgcccacctacaacaaccacctctacaaacaaatttccagccaatcaggagcctcgaacgacaatcactactttggctacagcaccccttgggggtattttgacttcaacagattccactgccacttttcaccacgtgactggcaaagactcatcaacaacaactggggattccgacccaagagactcaacttcaagctctttaacattcaagtcaaagaggtcacgcagaatgacggtacgacgacgattgccaataaccttaccagcacggttcaggtgtttactgactcggagtaccagctcccgtacgtcctcggctcggcgcatcaaggatgcctcccgccgttcccagcagacgtcttcatggtgccacagtatggatacctcaccctgaacaacgggagtcaggcagtaggacgctcttcattttactgcctggagtacttcccttctcagatgctgcgtaccggaaacaactttaccttcagctacacttttgaggacgttcctttccacagcagctacgctcacagccagagtctggaccgtctcatgaatcctctcatcgaccagtacctgtattacttgagcagaacacactccaatagtggaactcaccagcagtcaaggcttcagttttctcaggccggagcgagcatgtcgggaccagctaggaactggcttcctggaccctgttaccgccagcagcgagtatcaaagcagtctgcggataacaacaacagtgaatactcgtggactggagctaccaagtaccgcctcaatggcagagactctctggtgaatccgggctcggccatggcaagccacaaggacgatgaagaaaagtttttcctcatgagcggggttctcatctttgggaagcaaggctcagatgaaaacaatgtggacattgaaaaggtcatgattacagacgaagaggaaatcaggacaaccaatcccgtggctacggagcagtatggttctgtatctaccaacctccaagaggcaaagacaagtccagctaccgcagatgtcaatcaccaaggcgttcttccaggcatggtctggcaggacagagatgtgtaccttcaggggcccatctgggcaaagattccacacacggacggacattttcacccctctcccctcatgggtggattcggacttaaacaccctcctccacagattctcatcaagaacaccccggtacctgcgaatccttcgaccaccttcagtgcggcaaagtttgcttccttcatcacacagtactccacgggacaggtcagcgtggagatcgagtgggagctgcagaaggaaaacagcaaacgctggaatcccgaaattcagtacacttccaactacaacaagtctgttaatgtggactttactgtggacactaatggcgtgtattcagagcctcgccccattggcaccagatacctgactcgtaatctgtaa

SEQ ID NO: 4274 - DNA, 2205 bp, Artificial Sequence
  Description of Artificial Sequence: Synthetic polynucleotide
atggctgccgatggttatcttccagattggctcgaggacactctctctgaaggaataagacagtggtggaagctcaaacctggcccaccaccgccaaagcccgcagagcggcacaaggacgacagtaggggtcttgtgcttcctgggtacaagtacctcggacccttcaacggactcgacaaaggagagccggtcaacgaggcagacgccgcggccctcgagcacgacaaggcctacgaccggcagctcgacagcggagacaacccgtacctcaagtacaaccacgccgacgcggagtttcaggagcgtcttaaagaagatacgtcttttgggggcaacctcggacgagcagtattccaggcgaaaaagagggttcttgaacctctgggcctggttgaggagcctgttaagacggctccgggaaaaaagaggccggtagagcactctcctgtggagccagactcctcctcgggaaccggaaaagcgggccagcagcctgcaagaaaaagattgaattttggtcagactggagacgcagactccgtacctgacccccagcctctcggacagccaccagcagcccccacaagtttgggatctactacaatggctacaggcagtggcgcaccaatggcagacaataacgagggtgccgatggagtgggtaattcctcaggaaattggcattgcgattcccaatggctgggcgacagagtcatcaccaccagcacccgaacctgggccctgcccacctacaacaaccacctctacaagcaaatctccagccaatcaggagcatcgaacgacaaccactactttggccacagcaccccttgggggtattttgacttcaacagattccactgtcacttctccccacgtgactggcaaagactcatcaacaacaactggggattccgacccaagagactcaacttcaagctctttaacattcaagtcaaagaggtcacgcagaatgacggtacgacgacgattgccaataaccttaccagcacggttcaggtgtttactgactcggagtaccagctcccgtacgtcctcggctcggcgcatcaaggatgcctcccgccgttcccagcagacgtcttcatggtgccacagtatggatacctcaccctgaacaacgggagtcaggcagtaggacgctcttcattttactgcctggagtactttccttctcagatgctgcgtaccggaaacaactttaccttcagctacacttttgaggacgttcctttccacagcagctacgctcacagccagagtctggaccgtctcatgaatcctctcatcgaccagtacctgtattacttgagcagaacacactccaatagtggaactcaccagcagtcaaggcttcagttttctcaggccggagcgagcatgtcgggaccagctaggaactggcttcctggaccctgttaccgccagcagcgagtatcaaagcagtctgcggataacaacaacagtgaatactcgtggactggagctaccaagtaccacctcaatggcagagactctctggtgaatccgggcccggccatggcaagccacaaggacgatgaagaaaagtttttcctcatgagcggggttctcatctttgggaagcaaggctcagatgaaaacaatgtggacattgaaaaggtcatgattacagacgaagaggaaatcaggacaaccaatcccgtggctacggagcagtatggttctgtatctaccaacctccaagaggcaaagacaagtccagctaccgcagatgtcaatcaccaaggcgttcttccaggcatggtctggcaggacagagatgtgtaccttcaggggcccatctgggcaaagattccacacacggacggacattttcacccctctcccctcatgggtggattcggacttaaacaccctcctccacagattctcatcaagaacaccccggtacctgcgaatccttcgaccaccttcagtgcggcaaagtttgcttccttcatcacacagtactccacgggacaggccagcgtggagatcgagtgggagctgcagaaggaaaacagcaaacgctggaatcccgaaattcagtacacttccaactacaacaagtctgttaatgtggactttactgtggacactaatggcgtgtattcagagcctcgccccattggcaccagatacctgactcgtaatctgtaa

SEQ ID NO: 4275 - DNA, 2205 bp, Artificial Sequence
  Description of Artificial Sequence: Synthetic polynucleotide
atggctgccgatggttatcttccagattggctcgaggacactctctctgaaggaataagacagtggtggaagctcaaacctggcccaccaccgccaaagcccgcagagcggcacaaggacgacagtaggggtcttgtgcttcctgggtacaagtacctcggacccttcaacggactcgacaaaggagagccggtcaacgaggcagacgccgcggccctcgagcacgacaaggcctacgaccggcagctcgacagcggagacaacccgtacctcaagtacaaccacgccgacgcggagtttcaggagcgtcttaaagaagatacgtcttttgggggcaacctcggacgagcagtattccaggcgaaaaagagggttcttgaacctctgggcctggttgaggagcctgttaagacggctccgggaaaaaagaggccggtagagcactctcctgtggagccagactcctcctcgggaaccggaaaagcgggccagcagcctgcaagaaaaagattgaattttggtcagactggagacgcagactccgtacctgacccccagcctctcggacagccaccagcagcccccacaagtttgggatctactacaatggctacaggcagtggcgcaccaatggcagacaataacgagggtgccgatggagtgggtaattcctcaggaaattggcattgcgattcccaatggctgggcgacagagtcatcaccaccagcacccgaacctgggccctgcccacctacaacaaccacctctacaagcaaatctccagccaatcaggagcatcgaacgacaaccactactttggctacagcaccccttgggggtattttgacttcaacagattccactgtcacttctccccacgtgactggcaaagactcatcaacaacaactggggattccgacccaagagactcaacttcaagctctttaacattcaagtcaaagaggtcacgcagaatgacggtacgacgacgattgccaataaccttaccagcacggttcaggtgtttactgactcggagtaccagctcccgtacgtcctcggctcggcgcatcaaggatgcctcccgccgttcccagcagacgtcttcatggtgccacagtatggatacctcaccctgaacaacgggagtcaggcagtaggacgctcttcattttactgcctggagtacttcccttctcagatgctgcgtaccggaaacaactttaccttcagctacacttttgaggacgttcctttccacagcagctacgctcacagccagagtctggaccgtctcatgaatcctctcatcgaccagtacctgtattacttgagcagaacacactccaatagtggaactcaccagcagtcaaggcttcagttttctcaggccggagcgagcatgtcgggaccagctaggaactggcttcctggaccctgttaccgccagcagcgagtatcaaagcagtctgcggataacaacaacagtgaatactcgtggactggagctaccaagtaccgcctcaatggcagagactctctggtgaatccgggctcggccatggcaagccacaaggacgatgaagaaaagtttttcctcatgagcggggttctcatctttgggaagcaaggctcagatgaaaacaatgtggacattgaaaaggtcatgattacagacgaagaggaaatcaggacaaccaatcccgtggctacggagcagtatggttctgtatctaccaacctccaagaggcaaagacaagtccagctaccgcagatgtcaatcaccaaggcgttcttccaggcatggtctggcaggacagagatgtgtaccttcaggggcccatctgggcaaagattccacacacggacggacattttcacccctctcccctcatgggtggattcggacttaaacaccctcctccacagattctcatcaagaacaccccggtacctgcgaatccttcgaccaccttcagtgcggcaaagtttgcttccttcatcacacagtactccacgggacaggtcagcgtggagatcgagtgggagctgcagaaggaaaacagcaaacgctggaatcccgaaattcagtacacttccaactacaacaagtctgttaatgtggactttactgtggacactaatggcgtgtattcagagcctcgccccattggcaccagatacctgactcgtaatctgtaa

SEQ ID NO: 4276 - DNA, 2205 bp, Artificial Sequence
  Description of Artificial Sequence: Synthetic polynucleotide
atggctgccgatggttatcttccagattggctcgaggacactctctctgaaggaataagacagtggtggaagctcaaacctggcccaccaccgccaaagcccgcagagcggcacaaggacgacagtaggggtcttgtgcttcctgggtacaagtacctcggacccttcaacggactcgacaaaggagagccggtcaacgaggcagacgccgcggccctcgagcacgacaaggcctacgaccggcagctcgacagcggagacaacccgtacctcaagtacaaccacgccgacgcggagtttcaggagcgtcttaaagaagatacgtcttttgggggcaacctcggacgagcagtattccaggcgaaaaagagggttcttgaacctctgggcctggttgaggaacctgttaagacggctccgggaaaaaagaggccggtagagcactctcctgtggagccagactcctcctcgggaaccggaaaggcgggccagcagcctgcaagaaaaagattgaattttggtcagactggagacgcagactcagtacctgacccccagcctctcggacagccaccagcagccccctctggtctgggaactaatacgatggctacaggcagtggcgcaccaatggcagacaataacgagggcgccgacggagtgggtaattcctcgggaaattggcattgcgattccacatggatgggcgacagagtcatcaccaccagcacccgaacctgggccctgcccacctacaacaaccacctctacaaacaaatttccagccaatcaggagcctcgaacgacaatcactactttggctacagcaccccttgggggtattttgacttcaacagattccactgccacttttcaccacgtgactggcaaagactcatcaacaacaactggggattccgacccaagagactcaacttcaagctctttaacattcaagtcaaagaggtcacgcagaatgacggtacgacgacgattgccaataaccttaccagcacggttcaggtgtttactgactcggagtaccagctcccgtacgtcctcggctcggcgcatcaaggatgcctcccgccgttcccagcagacgtcttcatggtgccacagtatggatacctcaccctgaacaacgggagtcaggcagtaggacgctcttcattttactgcctggagtacttcccttctcagatgctgcgtaccggaaacaactttaccttcagctacacttttgaggacgttcctttccacagcagctacgctcacagccagagtctggaccgtctcatgaatcctctcatcgaccagtacctgtattacttgagcagaacacactccaatagtggaactcaccagcagtcaaggcttcagttttctcaggccggagcgagcatgtcgggaccagctaggaactggcttcctggaccctgttaccgccagcagcgagtatcaaagcagtctgcggataacaacaacagtgaatactcgtggactggagctaccaagtaccgcctcaatggcagagactctctggtgaatccgggctcggccatggcaagccacaaggacgatgaagaaaagtttttcctcatgagcggggttctcatctttgggaagcaaggctcagatgaaaacaatgtggacattgaaaaggtcatgattacagacgaagaggaaatcaggacaaccaatcccgtggctacggagcagtatggttctgtatctaccaacctccaagaggcaaagacaagtccagctaccgcagatgtcaatcaccaaggcgttcttccaggcatggtctggcaggacagagatgtgtaccttcaggggcccatctgggcaaagattccacacacggacggacattttcacccctctcccctcatgggtggattcggacttaaacaccctcctccacagattctcatcaagaacaccccggtacctgcgaatccttcgaccaccttcagtgcggcaaagtttgcttccttcatcacacagtactccacgggacaggccagcgtggagatcgagtgggagctgcagaaggaaaacagcaaacgctggaatcccgaaattcagtacacttccaactacaacaagtctgttaatgtggactttactgtggacactaatggcgtgtattcagagcctcgccccattggcaccagatacctgactcgtaatctgtaa

SEQ ID NO: 4277 - DNA, 2205 bp, Artificial Sequence
  Description of Artificial Sequence: Synthetic polynucleotide
atggctgccgatggttatcttccagattggctcgaggacactctctctgaaggaataagacagtggtggaagctcaaacctggcccaccaccgccaaagcccgcagagcggcacaaggacgacagtaggggtcttgtgcttcctgggtacaagtacctcggacccttcaacggactcgacaaaggagagccggtcaacgaggcagacgccgcggccctcgagcacgacaaggcctacgaccggcagctcgacagcggagacaacccgtacctcaagtacaaccacgccgacgcggagtttcaggagcgtcttaaagaagatacgtcttttgggggcaacctcggacgagcagtattccaggcgaaaaagagggttcttgaacctctgggcctggttgaggagcctgttaagacggctccgggaaaaaagaggccggtagagcactctcctgtggagccagactcctcctcgggaaccggaaaagcgggccagcagcctgcaagaaaaagattgaattttggtcagactggagacgcagactccgtacctgacccccagcctctcggacagccaccagcagcccccacaagtttgggatctactacaatggctacaggcagtggcgcaccaatggcagacaataacgagggtgccgatggagtgggtaattcctcgggaaattggcattgcgattccacatggatgggcgacagagtcatcaccaccagcacccgaacctgggccctgcccacctacaacaaccacctctacaaacaaatttccagccaatcaggagcctcgaacgacaatcactactttggctacagcaccccttgggggtattttgacttcaacagattccactgccacttttcaccacgtgactggcaaagactcatcaacaacaactggggattccgacccaagagactcaacttcaagctctttaacattcaagtcaaagaggtcacgcagaatgacggtacgacgacgattgccaataaccttaccagcacggttcaggtgtttactgactcggagtaccagctcccgtacgtcctcggctcggcgcatcaaggatgcctcccgccgttcccagcagacgtcttcatggtgccacagtatggatacctcaccctgaacaacgggagtcaggcagtaggacgctcttcattttactgcctggagtacttcccttctcagatgctgcgtaccggaaacaactttaccttcagctacacttttgaggacgttcctttccacagcagctacgctcacagccagagtctggaccgtctcatgaatcctctcatcgaccagtacctgtattacttgagcagaacacactccaatagtggaactcaccagcagtcaaggcttcagttttctcaggccggagcgagcatgtcgggaccagctaggaactggcttcctggaccctgttaccgccagcagcgagtatcaaagcagtctgcggataacaacaacagtgaatactcgtggactggagctaccaagtaccgcctcaatggcagagactctctggtgaatccgggctcggccatggcaagccacaaggacgatgaagaaaagtttttcctcatgagcggggttctcatctttgggaagcaaggctcagatgaaaacaatgtggacattgaaaaggtcatgattacagacgaagaggaaatcaggacaaccaatcccgtggctacggagcagtatggttctgtatctaccaacctccaagaggcaaagacaagtccagctaccgcagatgtcaatcaccaaggcgttcttccaggcatggtctggcaggacagagatgtgtaccttcaggggcccatctgggcaaagattccacacacggacggacattttcacccctctcccctcatgggtggattcggacttaaacaccctcctccacagattctcatcaagaacaccccggtacctgcgaatccttcgaccaccttcagtgcggcaaagtttgcttccttcatcacacagtactccacgggacaggtcagcgtggagatcgagtgggagctgcagaaggaaaacagcaaacgctggaatcccgaaattcagtacacttccaactacaacaagtctgttaatgtggactttactgtggacactaatggcgtgtattcagagcctcgccccattggcaccagatacctgactcgtaatctgtaa

SEQ ID NO: 4278 - DNA, 2205 bp, Artificial Sequence
  Description of Artificial Sequence: Synthetic polynucleotide
atggctgccgatggttatcttccagattggctcgaggacactctctctgaaggaataagacagtggtggaagctcaaacctggcccaccaccaccaaagcccgcagagcggcataaggacgacagcaggggtcttgtgcttcctgggtacaagtacctcggacccttcaacggactcgacaagggagagccggtcaacgaggcagacgccgcggccctcgagcacgacaaagcctacgaccggcagctcgacagcggagacaacccgtacctcaagtacaaccacgccgacgcggagtttcaggagcgccttaaagaagatacgtcttttgggggcaacctcggacgagcagtcttccaggcgaaaaagagggttcttgaacctctgggcctggttgaggaacctgttaagacggctccgggaaaaaagaggccggtagagcactctcctgtggagccagactcctcctcgggaaccggaaaggcgggccagcagcctgcaagaaaaagattgaattttggtcagactggagacgcagactcagtacctgacccccagcctctcggacagccaccagcagccccctctggtctgggaactaatacgatggctacaggcagtggcgcaccaatggcagacaataacgagggcgccgacggagtgggtaattcctcgggaaattggcattgcgattccacatggatgggcgacagagtcatcaccaccagcacccgaacctgggccctgcccacctacaacaaccacctctacaaacaaatttccagccaatcaggagcctcgaacgacaatcactactttggctacagcaccccttgggggtattttgacttcaacagattccactgccacttttcaccacgtgactggcaaagactcatcaacaacaactggggattccgacccaagagactcaacttcaagctctttaacattcaagtcaaagaggtcacgcagaatggcggtacgacgacgattgccaataaccttaccagcacggttcaggtgtttactgactcggagtaccagctcccgtacgtcctcggctcggcgcatcaaggatgcctcccgccgttcccagcagacgtcttcatggtgccacagtatggatacctcaccctgaacaacgggagtcaggcagtaggacgctcttcattttactgcctggagtacttcccttctcagatgctgcgtaccggaaacaactttaccttcagctacacttttgaggacgttcctttccacagcagctacgctcacagccagagtctggaccgtctcatgaatcctctcatcgaccagtacctgtattacttgagcagaacacactccaatagtggaactcaccagcagtcaaggcttcagttttctcaggccggagcgagcatgtcgggaccagctaggaactggcttcctggaccctgttaccgccagcagcgagtatcaaagcagtctgcggataacaacaacagtgaatactcgtggactggagctaccaagtaccgcctcaatggcagagactctctggtgaatccgggctcggccatggcaagccacaaggacgatgaagaaaagtttttcctcatgagcggggttctcatctttgggaagcaaggctcagatgaaaacaatgtggacattgaaaaggtcatgattacagacgaagaggaaatcaggacaaccaatcccgtggctacggagcagtatggttctgtatctaccaacctccaagaggcaaagacaagtccagctaccgcagatgtcaatcaccaaggcgttcttccaggcatggtctggcaggacagagatgtgtaccttcaggggcccatctgggcaaagattccacacacggacggacattttcacccctctcccctcatgggtggattcggacttaaacaccctcctccacagattctcatcaagaacaccccggtacctgcgaatccttcgaccaccttcagtgcggcaaagtttgcttccttcatcacacagtactccacgggacaggtcagcgtggagatcgagtgggagctgcagaaggaaaacagcaaacgctggaatcccgaaattcagtacacttccaactacaacaagtctgttaatgtggactttactgtggacactaatggcgtgtattcagagcctcgccccattggcaccagatacctgactcgtaatctgtaa

SEQ ID NO: 4279 - DNA, 2208 bp, Artificial Sequence
  Description of Artificial Sequence: Synthetic polynucleotide
atggctgccgatggttatcttccagattggctcgaggacactctctctgaaggaataagacagtggtggaagctcaaacctggcccaccaccaccaaagcccgcagagcggcataaggacgacagcaggggtcttgtgcttcctgggtacaagtacctcggacccttcaacggactcgacaagggagagccggtcaacgaggcagacgccgcggccctcgagcacgacaaagcctacgaccggcagctcgacagcggagacaacccgtacctcaagtacaaccacgccgacgcggagtttcaggagcgccttaaagaagatacgtcttttgggggcaacctcggacgagcagtcttccaggcgaaaaagagggttcttgaacctctgggcctggttgaggaacctgttaagacggctccgggaaaaaagaggccggtagagcactctcctgtggagccagactcctcctcgggaaccggaaaggcgggccagcagcctgcaagaaaaagattgaattttggtcagactggagacgcagactcagtacctgacccccagcctctcggacagccaccagcagccccctctggtctgggaactaatacgatggctacaggcagtggcgcaccaatggcagacaataacgagggcgccgacggagtgggtaattcctcgggaaattggcattgcgattccacatggatgggcgacagagtcatcaccaccagcacccgaacctgggccctgcccacctacaacaaccacctctacaaacaaatttccagccaatcaggagcctcgaacgacaatcactactttggctacagcaccccttgggggtattttgacttcaacagattccactgccacttttcaccacgtgactggcaaagactcatcaacaacaactggggattccgacccaggagactcaacttcaagctctttaacattcaagtcaaagaggtcacgcagaatgacggtacgacgacgattgccaataaccttaccagcacggttcaggtgtttactgactcggagtaccagctcccgtacgtcctcggctcggcgcatcaaggatgcctcccgccgttcccagcagacgtcttcatggtgccacagtatggatacctcaccctgaacaacgggagtcaggcagtaggacgctcttcattttactgcctggagtactttccttctcagatgctgcgtaccggaaacaactttaccttcagctacacttttgaggacgttcctttccacagcagctacgctcacagccagagtctggaccgtctcatgaatcctctcatcgaccagtacctgtattacttgagcagaacaaacactccaagtggaaccaccacgcagtcaaggcttcagttttctcaggccggagcgagtgacattcgggaccagtctaggaactggcttcctggaccctgttaccgccagcagcgagtatcaaagacatctgcggataacaacaacagtgaatactcgtggactggagctaccaagtaccacctcaatggcagagactctctggtgaatccgggcccggccatggcaagccacaaggacgatgaagaaaagttttttcctcagagcggggttctcatctttgggaagcaaggctcagagaaaacaaatgtggacattgaaaaggtcatgattacagacgaagaggaaatcaggacaaccaatcccgtggctacggagcagtatggttctgtatctaccaacctccagagaggcaacagacaagcagctaccgcagatgtcaacacacaaggcgttcttccaggcatggtctggcaggacagagatgtgtaccttcaggggcccatctgggcaaagattccacacacggacggacattttcacccctctcccctcatgggtggattcggacttaaacaccctcctccacagattctcatcaagaacaccccggtacctgcgaatccttcgaccaccttcagtgcggcaaagtttgcttccttcatcacacagtactccacgggacaggtcagcgtggagatcgagtgggagctgcagaaggaaaacagcaaacgctggaatcccgaaattcagtacacttccaactacaacaagtctgttaatgtggactttactgtggacactaatggcgtgtattcagagcctcgccccattggcaccagatacctgactcgtaatctgtaa

SEQ ID NO: 4280 - DNA, 2208 bp, Artificial Sequence
  Description of Artificial Sequence: Synthetic polynucleotide
atggctgccgatggttatcttccagattggctcgaggacactctctctgaaggaataagacagtggtggaagctcaaacctggcccaccaccaccaaagcccgcagagcggcataaggacgacagcaggggtcttgtgcttcctgggtacaagtacctcggacccttcaacggactcgacaagggagagccggtcaacgaggcagacgccgcggccctcgagcacgacaaagcctacgaccggcagctcgacagcggagacaacccgtacctcaagtacaaccacgccgacgcggagtttcaggagcgccttaaagaagatacgtcttttgggggcaacctcggacgagcagtcttccaggcgaaaaagagggttcttgaacctctgggcctggttgaggaacctgttaagacggctccgggaaaaaagaggccggtagagcactctcctgtggagccagactcctcctcgggaaccggaaaggcgggccagcagcctgcaagaaaaagattgaattttggtcagactggagacgcagactcagtacctgacccccagcctctcggacagccaccagcagccccctctggtctgggaactaatacgatggctacaggcagtggcgcaccaatggcagacaataacgagggcgccgacggagtgggtaattcctcgggaaattggcattgcgattccacatggatgggcgacagagtcatcaccaccagcacccgaacctgggccctgcccacctacaacaaccacctctacaaacaaatttccagccaatcaggagcctcgaacgacaatcactactttggctacagcaccccttgggggtattttgacttcaacagattccactgccacttttcaccacgtgactggcaaagactcatcaacaacaactggggattccgacccaagagactcaacttcaagctctttaacattcaagtcaaagaggtcacgcagaatgacggtacgacgacgattgccaataaccttaccagcacggttcaggtgtttactgactcggagtaccagctcccgtacgtcctcggctcggcgcatcaaggatgcctcccgccgttcccagcagacgtcttcatggtgccacagtatggatacctcaccctgaacaacgggagtcaggcagtaggacgctcttcattttactgcctggagtactttccttctcagatgctgcgtaccggaaacaactttaccttcagctacacttttgaggacgttcctttccacagcagctacgctcgcagccagagtctggaccgtctcatgaatcctctcatcgaccagtacctgtattacttgagcagaacaaacactccaagtggaaccaccacgcagtcaaggcttcagttttctcaggccggagcgagtgacattcgggaccagtctaggaactggcttcctggaccctgttaccgccagcagcgagtatcaaagacatctgcggataacaacaacagtgaatactcgtggactggagctaccaagtaccacctcaatggcagagactctctggtgaatccgggcccggccatggcaagccacaaggacgatgaagaaaagttttttcctcagagcggggttctcatctttgggaagcaaggctcagagaaaacaaatgtggacattgaaaaggtcatgattacagacgaagaggaaatcaggacaaccaatcccgtggctacggagcagtatggttctgtatctaccaacctccagagaggcaacagacaagcagctaccgcagatgtcaacacacaaggcgttcttccaggcatggtctggcaggacagagatgtgtaccttcaggggcccatctgggcaaagattccacacacggacggacattttcacccctctcccctcatgggtggattcggacttaaacaccctcctccacagattctcatcaagaacaccccggtacctgcgaatccttcgaccaccttcagtgcggcaaagtttgcttccttcatcacacagtactccacgggacaggtcagcgtggagatcgagtgggagctgcagaaggaaaacagcaaacgctggaatcccgaaattcagtacacttccaactacaacaagtctgttaatgtggactttactgtggacactaatggcgtgtattcagagcctcgccccattggcaccagatacctgactcgtaatctgtaa

SEQ ID NO: 4281 - DNA, 2208 bp, Artificial Sequence
  Description of Artificial Sequence: Synthetic polynucleotide
atggctgccgatggttatcttccagattggctcgaggacactctctctgaaggaataagacagtggtggaagctcaaacctggcccaccaccaccaaagcccgcagagcggcataaggacgacagcaggggtcttgtgcttcctgggtacaagtacctcggacccttcaacggactcgacaagggagagccggtcaacgaggcagacgccgcggccctcgagcacgacaaagcctacgaccggcagctcgacagcggagacaacccgtacctcaagtacaaccacgccgacgcggagtttcaggagcgccttaaagaagatacgtcttttgggggcaacctcggacgagcagtcttccaggcgaaaaagagggttcttgaacctctgggcctggttgaggaacctgttaagacggctccgggaaaaaagaggccggtagagcactctcctgtggagccagactcctcctcgggaaccggaaaggcgggccagcagcctgcaagaaaaagattgaattttggtcagactggagacgcagactcagtacctgacccccagcctctcggacagccaccagcagccccctctggtctgggaactaatacgatggctacaggcagtggcgcaccaatggcagacaataacgagggcgccgacggagtgggtaattcctcgggaaattggcattgcgattccacatggatgggcgacagagtcatcaccaccagcacccgaacctgggccctgcccacctacaacaaccacctctacaaacaaatttccagccaatcaggagcctcgaacgacaatcactactttggctacagcaccccttgggggtattttgacttcaacagattccactgccacttttcaccacgtgactggcaaagactcatcaacaacaactggggattccgacccaagagactcaacttcaagctctttaacattcaagtcaaagaggtcacgcagaatgacggtacgacgacgattgccaataaccttaccagcacggttcaggtgtttactgactcggagtaccagctcccgtacgtcctcggctcggcgcatcaaggatgcctcccgccgttcccagcagacgtcttcatggtgccacagtatggatacctcaccctgaacaacgggagtcaggcagtaggacgctcttcattttactgcctggagtactttccttctcagatgctgcgtaccggaaacaactttaccttcagctacacttttgaggacgttcctttccacagcagctacgctcacagccagagtctggaccgtctcatgaatcctctcatcgaccagtacctgtattacttgagcagaacaaacactccaagtggaaccaccacgcagtcaaggcttcagttttctcaggccggagcgagtgacattcgggaccagtctaggaactggcttcctggaccctgttaccgccagcagcgagtatcaaagacatctgcggataacaacaacagtgaatactcgtggactggagttaccaagtaccacctcaatggcagagactctctggtgaatccgggcccggccatggcaagccacaaggacgatgaagaaaagttttttcctcagagcggggttctcatctttgggaagcaaggctcagagaaaacaaatgtggacattgaaaaggtcatgattacagacgaagaggaaatcaggacaaccaatcccgtggctacggagcagtatggttctgtatctaccaacctccagagaggcaacagacaagcagctaccgcagatgtcaacacacaaggcgttcttccaggcatggtctggcaggacagagatgtgtaccttcaggggcccatctgggcaaagattccacacacggacggacattttcacccctctcccctcatgggtggattcggacttaaacaccctcctccacagattctcatcaagaacaccccggtacctgcgaatccttcgaccaccttcagtgcggcaaagtttgcttccttcatcacacagtactccacgggacaggtcagcgtggagatcgagtgggagctgcagaaggaaaacagcaaacgctggaatcccgaaattcagtacacttccaactacaacaagtctgttaatgtggactttactgtggacactaatggcgtgtattcagagcctcgccccattggcaccagatacctgactcgtaatctgtaa

SEQ ID NO: 4282 - DNA, 2208 bp, Artificial Sequence
  Description of Artificial Sequence: Synthetic polynucleotide
atggctgccgatggttatcttccagattggctcgaggacactctctctgaaggaataagacagtggtggaagctcaaacctggcccaccaccaccaaagcccgcagagcggcataaggacgacagcaggggtcttgtgcttcctgggtacaagtacctcggacccttcaacggactcgacaagggagagccggtcaacgaggcagacgccgcggccctcgagcacgacaaagcctacgaccggcagctcgacagcggagacaacccgtaccccaagtacaaccacgccgacgcggagtttcaggagcgccttaaagaagatacgtcttttgggggcaacctcggacgagcagtcttccaggcgaaaaagagggttcttgaacctctgggcctggttgaggaacctgttaagacggctccgggaaaaaagaggccggtagagcactctcctgtggagccagactcctcctcgggaaccggaaaggcgggccagcagcctgcaagaaaaagattgaattttggtcagactggagacgcagactcagtacctgacccccagcctctcggacagccaccagcagccccctctggtctgggaactaatacgatggctacaggcagtggcgcaccaatggcagacaataacgagggcgccgacggagtgggtaattcctcgggaaattggcattgcgattccacatggatgggcgacagagtcatcaccaccagcacccgaacctgggccctgcccacctacaacaaccacctctacaaacaaatttccagccaatcaggagcctcgaacgacaatcactactttggctacagcaccccttgggggtattttgacttcaacagattccactgccacttttcaccacgtgactggcaaagactcatcaacaacaactggggattccgacccaagagactcaacttcaagctctttaacattcaagtcaaagaggtcacgcagaatgacggtacgacgacgattgccaataaccttaccagcacggttcaggtgtttactgactcggagtaccagctcccgtacgtcctcggctcggcgcatcaaggatgcctcccgccgttcccagcagacgtcttcatggtgccacagtatggatacctcaccctgaacaacgggagtcaggcagtaggacgctcttcattttactgcctggagtactttccttctcagatgctgcgtaccggaaacaactttaccttcagctacacttttgaggacgttcctttccacagcagctacgctcacagccagagtctggaccgtctcatgaatcctctcatcgaccagtacctgtattacttgagcagaacaaacactccaagtggaaccaccacgcagtcaaggcttcagttttctcaggccggagcgagtgacattcgggaccagtctaggaactggcttcctggaccctgttaccgccagcagcgagtatcaaagacatctgcggataacaacaacagtgaatactcgtggactggagctaccaagtaccacctcaatggcagagactctctggtgaatccgggcccggccatggcaagccacaaggacgatgaagaaaagttttttcctcagagcggggttctcatctttgggaagcaaggctcagagaaaacaaatgtggacattgaaaaggtcatgattacagacgaagaggaaatcaggacaaccaatcccgtggctacggagcagtatggttctgtatctaccaacctccagagaggcaacagacaagcagctaccgcagatgtcaacacacaaggcgttcttccaggcatggtctggcaggacagagatgtgtaccttcaggggcccatctgggcaaagattccacacacggacggacattttcacccctctcccctcatgggtggattcggacttaaacaccctcctccacagattctcatcaagaacaccccggtacctgcgaatccttcgaccaccttcagtgcggcaaagtttgcttccttcatcacacagtactccacgggacaggtcagcgtggagatcgagtgggagctgcagaaggaaaacagcaaacgctggaatcccgaaattcagtacacttccaactacaacaagtctgttaatgtggactttactgtggacactaatggcgtgtattcagagcctcgccccattggcaccagatacctgactcgtaatctgtaa

SEQ ID NO: 4283 - DNA, 2208 bp, Artificial Sequence
  Description of Artificial Sequence: Synthetic polynucleotide
atggctgccgatggttatcttccagattggctcgaggacactctctctgaaggaataagacagtggtggaagctcaaacctggcccaccaccaccaaagcccgcagagcggcataaggacgacagcaggggtcttgtgcttcctgggtacaagtacctcggacccttcaacggactcgacaagggagagccggtcaacgaggcagacgccgcggccctcgagcacgacaaagcctacgaccggcagctcgacagcggagacaacccgtacctcaagtacaaccacgccgacgcggagtttcaggagcgccttaaagaagatacgtcttttgggggcaacctcggacgagcagtcttccaggcgaaaaagagggttcttgaacctctgggcctggttgaggaacctgttaagacggctccgggaaaaaagaggccggtagagcactctcctgtggagccagactcctcctcgggaaccggaaaggcgggccagcagcctgcaagaaaaagattgaattttggtcagactggagacgcagactcagtacctgacccccagcctctcggacagccaccagcagccccctctggtctgggaactaatacgatggctacaggcagtggcgcaccaatggcagacaataacgagggcgccgacggagtgggtaattcctcgggaaattggcattgcgattccacatggatgggcgacagagtcatcaccaccagcacccgaacctgggccctgcccacctacaacaaccacctctacaaacaaatttccagccaatcaggagcctcgaacgacaatcactactttggctacagcaccccttgggggtattttgacttcaacagattccactgccacttttcaccacgtgactggcaaagactcatcaacaacaactggggattccgacccaagagactcaacttcaagctctttaacattcaagtcaaagaggtcacgcagaatgacggtacgacgacgattgccaataaccttaccagcacggttcaggtgtttactgactcggagtaccagctcccgtacgtcctcggctcggcgcatcaaggatgcctcccgccgttcccagcagacgtcttcatggtgccacagtatggatacctcaccctgaacaacgggagtcaggcagtaggacgctcttcattttactgcctggagtactttccttctcagatgctgcgtaccggaaacaactttaccttcagctacacttttgaggacgttcctttccacagcagctacgctcacagccagagtctggaccgtctcatgaatcctctcatcgaccagtacctgtattacttgagcagaacaaacactccaagtggaaccaccacgcagtcaaggcttcagttttctcaggccggagcgagtgacattcgggaccagtctaggaactggcttcctggaccctgttaccgccagcagcgagtatcaaagacatctgcggataacaacaacagtgaatactcgtggactggagctaccaagtaccacctcaatggcagagactctctggtgaatccgggcccggccatggcaagccacaaggacgatgaagaaaagttttttcctcagagcggggttcccatctttgggaagcaaggctcagagaaaacaaatgtggacattgaaaaggtcatgattacagacgaagaggaaatcaggacaaccaatcccgtggctacggagcagtatggttctgtatctaccaacctccagagaggcaacagacaagcagctaccgcagatgtcaacacacaaggcgttcttccaggcatggtctggcaggacagagatgtgtaccttcaggggcccatctgggcaaagattccacacacggacggacattttcacccctctcccctcatgggtggattcggacttaaacaccctcctccacagattctcatcaagaacaccccggtacctgcgaatccttcgaccaccttcagtgcggcaaagtttgcttccttcatcacacagtactccacgggacaggtcagcgtggagatcgagtgggagctgcagaaggaaaacagcaaacgctggaatcccgaaattcagtacacttccaactacaacaagtctgttaatgtggactttactgtggacactaatggcgtgtattcagagcctcgccccattggcaccagatacctgactcgtaatctgtaa

SEQ ID NO: 4284 - DNA, 2208 bp, Artificial Sequence
  Description of Artificial Sequence: Synthetic polynucleotide
atggctgccgatggttatcttccagattggctcgaggacactctctctgaaggaataagacagtggtggaagctcaaacctggcccaccaccaccaaagcccgcagagcggcataaggacgacagcaggggtcttgtgcttcctgggtacaagtacctcggacccttcaacggactcgacaagggagagccggtcaacgaggcagacgccgcggccctcgagcacgacaaagcctacgaccggcagctcgacagcggagacaacccgtacctcaagtacaaccacgccgacgcggagtttcaggagcgccttaaagaagatacgtcttttgggggcaacctcggacgagcagtcttccaggcgaaaaagagggttcttgaacctctgggcctggttgaggaacctgttaagacggctccgggaaaaaagaggccggtagagcactctcctgtggagccagactcctcctcgggaaccggaaaggcgggccagcagcctgcaagaaaaagattgaattttggtcagactggagacgcagactcagtacctgacccccagcctctcggacagccaccagcagccccccctggtctgggaactaatacgatggctacaggcagtggcgcaccaatggcagacaataacgagggcgccgacggagtgggtaattcctcgggaaattggcattgcgattccacatggatgggcgacagagtcatcaccaccagcacccgaacctgggccctgcccacctacaacaaccacctctacaaacaaatttccagccaatcaggagcctcgaacgacaatcactactttggctacagcaccccttgggggtattttgacttcaacagattccactgccacttttcaccacgtgactggcaaagactcatcaacaacaactggggattccgacccaagagactcaacttcaagctctttaacattcaagtcaaagaggtcacgcagaatgacggtacgacgacgattgccaataaccttaccagcacggttcaggtgtttactgactcggagtaccagctcccgtacgtcctcggctcggcgcatcaaggatgcctcccgccgttcccagcagacgtcttcatggtgccacagtatggatacctcaccctgaacaacgggagtcaggcagtaggacgctcttcattttactgcctggagtactttccttctcagatgctgcgtaccggaaacaactttaccttcagctacacttttgaggacgttcctttccacagcagctacgctcacagccagagtctggaccgtctcatgaatcctctcatcgaccagtacctgtattacttgagcagaacaaacactccaagtggaaccaccacgcagtcaaggcttcagttttctcaggccggagcgagtgacattcgggaccagtctaggaactggcttcctggaccctgttaccgccagcagcgagtatcaaagacatctgcggataacaacaacagtgaatactcgtggactggagctaccaagtaccacctcaatggcagagactctctggtgaatccgggcccggccatggcaagccacaaggacgatgaagaaaagttttttcctcagagcggggttctcatctttgggaagcaaggctcagagaaaacaaatgtggacattgaaaaggtcatgattacagacgaagaggaaatcaggacaaccaatcccgtggctacggagcagtatggttctgtatctaccaacctccagagaggcaacagacaagcagctaccgcagatgtcaacacacaaggcgttcttccaggcatggtctggcaggacagagatgtgtaccttcaggggcccatctgggcaaagattccacacacggacggacattttcacccctctcccctcatgggtggattcggacttaaacaccctcctccacagattctcatcaagaacaccccggtacctgcgaatccttcgaccaccttcagtgcggcaaagtttgcttccttcatcacacagtactccacgggacaggtcagcgtggagatcgagtgggagctgcagaaggaaaacagcaaacgctggaatcccgaaattcagtacacttccaactacaacaagtctgttaatgtggactttactgtggacactaatggcgtgtattcagagcctcgccccattggcaccagatacctgactcgtaatctgtaa

SEQ ID NO: 4285 - DNA, 2208 bp, Artificial Sequence
  Description of Artificial Sequence: Synthetic polynucleotide
atggctgccgatggttatcttccagattggctcgaggacactctctctgaaggaataagacagtggtggaagctcaaacctggcccaccaccaccaaagcccgcagagcggcataaggacgacagcaggggtcttgtgcttcctgggtacaagtacctcggacccttcaacggactcgacaagggagagccggtcaacgaggcagacgccgcggccctcgagcacgacaaagcctacgaccggcagctcgacagcggagacaacccgtacctcaagtacaaccacgccgacgcggagtttcaggagcgccttaaagaagatacgtcttttgggggcaacctcggacgagcagtcttccaggcgaaaaagagggttcttgaacctctgggcctggttgaggaacctgttaagacggctccgggaaaaaagaggccggtagagcactctcctgtggagccagactcctcctcgggaaccggaaaggcgggccagcagcctgcaagaaaaagattgaattttggtcagactggagacgcagactcagtacctgacccccagcctctcggacagccaccagcagccccctctggtctgggaactaatacgatggctacaggcagtggcgcaccaatggcagacaataacgagggcgccgacggagtgggtaattcctcgggaaattggcattgcgattccacatggatgggcgacagagtcatcaccaccagcacccgaacctgggccctgcccacctacaacaaccacctctacaaacaaatttccagccaatcaggagcctcgaacgacaatcactactttggctacagcaccccttgggggtattttgacttcaacagattccactgccacttttcaccacgtgactggcaaagactcatcaacaacaactggggattccgacccaagagactcaacttcaagctctttaacattcaagtcaaagaggtcacgcagaatgacggtacgacgacgattgccaataaccttaccagcacggttcaggtgtttactgactcggagtaccagctcccgtacgtcctcggctcggcgcatcaaggatgcctcccgccgttcccagcagacgtcttcatggtgccacagtatggatacctcaccctgaacaacgggagtcaggcagtaggacgctcttcattttactgcctggagtactttccttctcagatgctgcgtaccggaaacaactttaccttcagctacacttttgaggacgttcctttccacagcagctacgctcacagccagagtctggaccgtctcatgaatcctctcatcgaccagtacctgtattacttgagcagaacaaacactccaagtggaaccaccacgcagtcaaggcttcagttttctcaggccggagcgagtgacattcgggaccagtctaggaactggcttcctggaccctgttaccgccagcagcgagtatcaaagacatctgcggataacaacaacagtgaatactcgtggactggagctaccaagtaccacctcaatggcagagactctctggtgaatccgggcccggccatggcaagccacaaggacgatgaagaaaagttttttcctcagagcgggattctcatctttgggaagcaaggctcagagaaaacaaatgtggacattgaaaaggtcatgattacagacgaagaggaaatcaggacaaccaatcccgtggctacggagcagtatggttctgtatctaccaacctccagagaggcaacagacaagcagctaccgcagatgtcaacacacaaggcgttcttccaggcatggtctggcaggacagagatgtgtaccttcaggggcccatctgggcaaagattccacacacggacggacattttcacccctctcccctcatgggtggattcggacttaaacaccctcctccacagattctcatcaagaacaccccggtacctgcgaatccttcgaccaccttcagtgcggcaaagtttgcttccttcatcacacagtactccacgggacaggtcagcgtggagatcgagtgggagctgcagaaggaaaacagcaaacgctggaatcccgaaattcagtacacttccaactacaacaagtctgttaatgtggactttactgtggacactaatggcgtgtattcagagcctcgccccattggcaccagatacctgactcgtaatctgtaa

SEQ ID NO: 4286 - DNA, 2208 bp, Artificial Sequence
  Description of Artificial Sequence: Synthetic polynucleotide
atggctgccgatggttatcttccagattggctcgaggacactctctctgaaggaataagacagtggtggaagctcaaacctggcccaccaccaccaaagcccgcagagcggcataaggacgacagcaggggtcttgtgcttcctgggtacaagtacctcggacccttcaacggactcgacaagggagagccggtcaacgaggcagacgccgcggccctcgagcacgacaaagcctacgaccggcagctcgacagcggagacaacccgtacctcaagtacaaccacgccgacgcggagtttcaggagcgccttaaagaagatacgtcttttgggggcaacctcggacgagcagtcttccaggcgaaaaagagggttcttgaacctctgggcctggttgaggaacctgttaagacggctccgggaaaaaagaggccggtagagcactctcctgtggagccagactcctcctcgggaaccggaaaggcgggccagcagcctgcaagaaaaagattgaattttggtcagactggagacgcagactcagtacctgacccccagcctctcggacagccaccagcagccccctctggtctgggaactaatacgatggctacaggcagtggcgcaccaatggcagacaataacgagggcgccgacggagtgggtaattcctcgggaaattggcattgcgattccacatggatgggcgacagagtcatcaccaccagcacccgaacctgggccctgcccacctacaacaaccacctctacaaacaaatttccagccaatcaggagcctcgaacgacaatcactactttggctacagcaccccttgggggtattttgacttcaacagattccactgccacttttcaccacgtgactggcaaagactcatcaacaacaactggggattccgacccaagagactcaacttcaagctctttaacattcaagtcaaagaggtcacgcagaatgacggtacgacgacgattgccaataaccttaccagcacggttcaggtgtttactgactcggagtaccagctcccgtacgtcctcggctcggcgcatcaaggatgcctcccgccgttcccagcagacgtcttcatggtgccacagtatggatacctcaccctgaacaacgggagtcaggcagtaggacgctcttcattttactgcctggagtactttccttctcagatgctgcgtaccggaaacaactttaccttcagctacacttttgaggacgttcctttccacagcagctacgctcacagccagagtctggaccgtctcatgaatcctctcatcgaccagtacctgtattacttgagcagaacaaacactccaagtggaaccaccacgcagtcaaggcttcagttttctcaggccggagcgagtgacattcgggaccagtctaggaactggcttcctggaccctgttaccgccagcagcgagtatcaaagacatctgcggataacaacaacagtgaatactcgtggactggagctaccaagtaccacctcaatggcagagactctctggtgaatccgggcccggccatggcaagccacaaggacgatgaagaaaagttttttcctcagagcggggttctcatctttgggaagcaaggctcagagaaaacaaatgtggacattgaaaaggtcatgattacagacgaagaggaaatcaggacaaccaatcccgtggctacggagcagtatggttctgtatctaccaacctccagagaggcaacagacaagcagctaccgcagatgtcaacacacaaggcgttcttccaggcatggtctggcaggacagagatgtgtaccttcaggggcccatctgggcaaagattccacacacggacggacattttcacccctctcccctcatgggtggattcggacttaaacaccctcctccacagattctcatcaagaacaccccggtacctgcgaatccttcgaccaccttcagtgcggcaaagtttgcttccttcatcacacagtactccacgggacaggtcagcgtggagatcgagtgggagctgcagaaggaaaacagcaaacgctggaatcccgaaattcagtgcacttccaactacaacaagtctgttaatgtggactttactgtggacactaatggcgtgtattcagagcctcgccccattggcaccagatacctgactcgtaatctgtaa

SEQ ID NO: 4287 - DNA, 2208 bp, Artificial Sequence
  Description of Artificial Sequence: Synthetic polynucleotide
atggctgccgatggttatcttccagattggctcgaggacactctctctgaaggaataagacagtggtggaagctcaaacctggcccaccaccaccaaagcccgcagagcggcataaggacgacagcaggggtcttgtgcttcctgggtacaagtacctcggacccttcaacggactcgacaagggagagccggtcaacgaggcagacgccgcggccctcgagcacgacaaagcctacgaccggcagctcgacagcggagacaacccgtacctcaagtacaaccacgccgacgcggagtttcaggagcgccttaaagaagatacgtcttttgggggcaacctcggacgagcagtcttccaggcgaaaaagagggttcttgaacctctgggcctggttgaggaacctgttaagacggctccgggaaaaaagaggccggtagagcactctcctgtggagccagactcctcctcgggaaccggaaaggcgggccagcagcctgcaagaaaaagattgaattttggtcagactggagacgcagactcagtacctgacccccagcctctcggacagccaccagcagccccctctggtctgggaactaatacgatggctacaggcagtggcgcaccaatggcagacaataacgagggcgccgacggagtgggtaattcctcgggaaattggcattgcgattccacatggatgggcgacagagtcatcaccaccagcacccgaacctgggccctgcccacctacaacaaccacctctacaaacaaatttccagccaatcaggagcctcgaacgacaatcactactttggctacagcaccccttgggggtattttgacttcaacagattccactgccacttttcaccacgcgactggcaaagactcatcaacaacaactggggattccgacccaagagactcaacttcaagctctttaacattcaagtcaaagaggtcacgcagaatgacggtacgacgacgattgccaataaccttaccagcacggttcaggtgtttactgactcggagtaccagctcccgtacgtcctcggctcggcgcatcaaggatgcctcccgccgttcccagcagacgtcttcatggtgccacagtatggatacctcaccctgaacaacgggagtcaggcagtaggacgctcttcattttactgcctggagtactttccttctcagatgctgcgtaccggaaacaactttaccttcagctacacttttgaggacgttcctttccacagcagctacgctcacagccagagtctggaccgtctcatgaatcctctcatcgaccagtacctgtattacttgagcagaacaaacactccaagtggaaccaccacgcagtcaaggcttcagttttctcaggccggagcgagtgacattcgggaccagtctaggaactggcttcctggaccctgttaccgccagcagcgagtatcaaagacatctgcggataacaacaacagtgaatactcgtggactggagctaccaagtaccacctcaatggcagagactctctggtgaatccgggcccggccatggcaagccacaaggacgatgaagaaaagttttttcctcagagcggggttctcatctttgggaagcaaggctcagagaaaacaaatgtggacattgaaaaggtcatgattacagacgaagaggaaatcaggacaaccaatcccgtggctacggagcagtatggttctgtatctaccaacctccagagaggcaacagacaagcagctaccgcagatgtcaacacacaaggcgttcttccaggcatggtctggcaggacagagatgtgtaccttcaggggcccatctgggcaaagattccacacacggacggacattttcacccctctcccctcatgggtggattcggacttaaacaccctcctccacagattctcatcaagaacaccccggtacctgcgaatccttcgaccaccttcagtgcggcaaagtttgcttccttcatcacacggtactccacgggacaggtcagcgtggagatcgagtgggagctgcagaaggaaaacagcaaacgctggaatcccgaaattcagtacacttccaactacaacaagtctgttaatgtggactttactgtggacactaatggcgtgtattcagagcctcgccccattggcaccagatacctgactcgtaatctgtaa

SEQ ID NO: 4288 - DNA, 2208 bp, Artificial Sequence
  Description of Artificial Sequence: Synthetic polynucleotide
atggctgccgatggttatcttccagattggctcgaggacactctctctgaaggaataagacagtggtggaagctcaaacctggcccaccaccaccaaagcccgcagagcggcataaggacgacagcaggggtcttgtgcttcctgggtacaagtacctcggacccttcaacggactcgacaagggagagccggtcaacgaggcagacgccgcggccctcgagcacgacaaagcctacgaccggcagctcgacagcggagacaacccgtacctcaagtacaaccacgccgacgcggagtttcgggagcgccttaaagaagatacgtcttttgggggcaacctcggacgagcagtcttccaggcgaaaaagagggttcttgaacctctgggcctggttgaggaacctgttaagacggctccgggaaaaaagaggccggtagagcactctcctgtggagccagactcctcctcgggaaccggaaaggcgggccagcagcctgcaagaaaaagattgaattttggtcagactggagacgcagactcagtacctgacccccagcctctcggacagccaccagcagccccctctggtctgggaactaatacgatggctacaggcagtggcgcaccaatggcagacaataacgagggcgccgacggagtgggtaattcctcgggaaattggcattgcgattccacatggatgggcgacagagtcatcaccaccagcacccgaacctgggccctgcccacctacaacaaccacctctacaaacaaatttccagccaatcaggagcctcgaacgacaatcactactttggctacagcaccccttgggggtattttgacttcaacagattccactgccacttttcaccacgtgactggcaaagactcatcaacaacaactggggattccgacccaagagactcaacttcaagctctttaacattcaagtcaaagaggtcacgcagaatgacggtacgacgacgattgccaataaccttaccagcacggttcaggtgtttactgactcggagtaccagctcccgtacgtcctcggctcggcgcatcaaggatgcctcccgccgttcccagcagacgtcttcatggtgccacagtatggatacctcaccctgaacaacgggagtcaggcagtaggacgctcttcattttactgcctggagtactttccttctcagatgctgcgtaccggaaacaactttaccttcagctacacttttgaggacgttcctttccacagcagctacgctcacagccagagtctggaccgtctcatgaatcctctcatcgaccagtacctgtattacttgagcagaacaaacactccaagtggaaccaccacgcagtcaaggcttcagttttctcaggccggagcgagtgacattcgggaccagtctaggaactggcttcctggaccctgttaccgccagcagcgagtatcaaagacatctgcggataacaacaacagtgaatactcgtggactggagctaccaagtaccacctcaatggcagagactctctggtgaatccgggcccggccatggcaagccacaaggacgatgaagaaaagttttttcctcagagcggggttctcatctttgggaagcaaggctcagagaaaacaaatgtggacattgaaaaggtcatgattacagacgaagaggaaatcaggacaaccaatcccgtggctacggagcagtatggttctgtatctaccaacctccagagaggcaacagacaagcagctaccgcagatgtcaacacacaaggcgttcttccaggcatggtctggcaggacagagatgtgtaccttcaggggcccatctgggcaaagattccacacacggacggacattttcacccctctcccctcatgggtggattcggacttaaacaccctcctccacagattctcatcaagaacaccccggtacctgcgaatccttcgaccaccttcagtgcggcaaagtttgcttccttcatcacacagtactccacgggacaggtcagcgtggagatcgagtgggagctgcagaaggaaaacagcaaacgctggaatcccgaaattcagtacacttccaactacaacaagtctgttaatgtggactttactgtggacactaatggcgtgtattcagagcctcgccccattggcaccagatacctgactcgtaatctgtaa

SEQ ID NO: 4289 - DNA, 2208 bp, Artificial Sequence
  Description of Artificial Sequence: Synthetic polynucleotide
atggctgccgatggttatcttccagattggctcgaggacactctctctgaaggaataagacagtggtggaagctcaaacctggcccaccaccaccaaagcccgcagagcggcataaggacgacagcaggggtcttgtgcttcctgggtacaagtacctcggacccttcaacggactcgacaagggagagccggtcaacgaggcagacgccgcggccctcgagcacgacaaagcctacgaccggcagctcgacagcggagacaacccgtacctcaagcacaaccacgccgacgcggagtttcaggagcgccttaaagaagatacgtcttttgggggcaacctcggacgagcagtcttccaggcgaaaaagagggttcttgaacctctgggcctggttgaggaacctgttaagacggctccgggaaaaaagaggccggtagagcactctcctgtggagccagactcctcctcgggaaccggaaaggcgggccagcagcctgcaagaaaaagattgaattttggtcagactggagacgcagactcagtacctgacccccagcctctcggacagccaccagcagccccctctggtctgggaactaatacgatggctacaggcagtggcgcaccaatggcagacaataacgagggcgccgacggagtgggtaattcctcgggaaattggcattgcgattccacatggatgggcgacagagtcatcaccaccagcacccgaacctgggccctgcccacctacaacaaccacctctacaaacaaatttccagccaatcaggagcctcgaacgacaatcactactttggctacagcaccccttgggggtattttgacttcaacagattccactgccacttttcaccacgtgactggcaaagactcatcaacaacaactggggattccgacccaagagactcaacttcaagctctttaacattcaagtcaaagaggtcacgcagaatgacggtacgacgacgattgccaataaccttaccagcacggttcaggtgtttactgactcggagtaccagctcccgtacgtcctcggctcggcgcatcaaggatgcctcccgccgttcccagcagacgtcttcatggtgccacagtatggatacctcaccctgaacaacgggagtcaggcagtaggacgctcttcattttactgcctggagtactttccttctcagatgctgcgtaccggaaacaactttaccttcagctacacttttgaggacgttcctttccacagcagctacgctcacagccagagtctggaccgtctcatgaatcctctcatcgaccagtacctgtattacttgagcagaacaaacactccaagtggaaccaccacgcagtcaaggcttcagttttctcaggccggagcgagtgacattcgggaccagtctaggaactggcttcctggaccctgttaccgccagcagcgagtatcaaagacatctgcggataacaacaacagtgaatactcgtggactggagctaccaagtaccacctcaatggcagagactctctggtgaatccgggcccggccatggcaagccacaaggacgatgaagaaaagttttttcctcagagcggggttctcatctttgggaagcaaggctcagagaaaacaaatgtggacattgaaaaggtcatgattacagacgaagaggaaatcaggacaaccaatcccgtggctacggagcagtatggttctgtatctaccaacctccagagaggcaacagacaagcagctaccgcagatgtcaacacacaaggcgttcttccaggcatggtctggcaggacagagatgtgtaccttcaggggcccatctgggcaaagattccacacacggacggacattttcacccctctcccctcatgggtggattcggacttaaacaccctcctccacagattctcatcaagaacaccccggtacctgcgaatccttcgaccaccttcagtgcggcaaagtttgcttccttcatcacacagtactccacgggacaggtcagcgtggagatcgagtgggagctgcagaaggaaaacagcaaacgctggaatcccgaaattcagtacacttccaactacaacaagtctgttaatgtggactttactgtggacactaatggcgtgtattcagagcctcgccccattggcaccagatacctgactcgtaatctgtaa

SEQ ID NO: 4290 - DNA, 2208 bp, Artificial Sequence
  Description of Artificial Sequence: Synthetic polynucleotide
atggctgccgatggttatcttccagattggctcgaggacactctctctgaaggaataagacagtggtggaagctcaaacctggcccaccaccaccaaagcccgcagagcggcataaggacgacagcaggggtcttgtgcttcctgggtacaagtacctcggacccttcaacggactcgacaagggagagccggtcaacgaggcagacgccgcggccctcgagcacgacaaagcctacgaccggcagctcgacagcggagacaacccgtacctcaagtacaaccacgccgacgcggagtttcaggagcgccttaaagaagatacgtcttttgggggcaacctcggacgagcagtcttccaggcgaaaaagagggttcttgaacctctgggcctggttgaggaacctgttaagacggctccgggaaaaaagaggccggtagagcactctcctgtggagccagactcctcctcgggaaccggaaaggcgggccagcagcctgcaagaaaaagattgaattttggtcagactggagacgcagactcagtacctgacccccagcctctcggacagccaccagcagccccctctggtctgggaactaatacgatggctacaggcagtggcgcaccaatggcagacaataacgagggcgccgacggagtgggtaattcctcgggaaattggcattgcgattccacatggatgggcgacagagtcatcaccaccagcacccgaacctgggccctgcccacctacaacaaccacctctacaaacaaatttccagccaatcaggagcctcgaacgacaatcactactttggctacagcaccccttgggggtattttgacttcaacagattccactgccacttttcaccacgtgactggcaaagactcatcaacaacaactggggattccgacccaagagactcaacttcaagctctttaacattcaagtcaaagaggtcacgcagaatgacggtacgacgacgattgccaataaccttaccagcacggttcaggtgtttactgactcggagtaccagctcccgtacgtcctcggctcggcgcatcaaggatgcctcccgccgttcccagcagacgtcttcatggtgccacagtatggatacctcaccctgaacaacgggagtcgggcagtaggacgctcttcattttactgcctggagtactttccttctcagatgctgcgtaccggaaacaactttaccttcagctacacttttgaggacgttcctttccacagcagctacgctcacagccagagtctggaccgtctcatgaatcctctcatcgaccagtacctgtattacttgagcagaacaaacactccaagtggaaccaccacgcagtcaaggcttcagttttctcaggccggagcgagtgacattcgggaccagtctaggaactggcttcctggaccctgttaccgccagcagcgagtatcaaagacatctgcggataacaacaacagtgaatactcgtggactggagctaccaagtaccacctcaatggcagagactctctggtgaatccgggcccggccatggcaagccacaaggacgatgaagaaaagttttttcctcagagcggggttctcatctttgggaagcaaggctcagagaaaacaaatgtggacattgaaaaggtcatgattacagacgaagaggaaatcaggacaaccaatcccgtggctacggagcagtatggttctgtatctaccaacctccagagaggcaacagacaagcagctaccgcagatgtcaacacacaaggcgttcttccaggcatggtctggcaggacagagatgtgtaccttcaggggcccatctgggcaaagattccacacacggacggacattttcacccctctcccctcatgggtggattcggacttaaacaccctcctccacagattctcatcaagaacaccccggtacctgcgaatccttcgaccaccttcagtgcggcaaagtttgcttccttcatcacacagtactccacgggacaggtcagcgtggagatcgagtgggagctgcagaaggaaaacagcaaacgctggaatcccgaaattcagtacacttccaactacaacaagtctgttaatgtggactttactgtggacactaatggcgtgtattcagagcctcgccccattggcaccagatacctgactcgtaatctgtaa

SEQ ID NO: 4291 - DNA, 2208 bp, Artificial Sequence
  Description of Artificial Sequence: Synthetic polynucleotide
atggctgccgatggttatcttccagattggctcgaggacactctctctgaaggaataagacagtggtggaagctcaaacctggcccaccaccaccaaagcccgcagagcggcataaggacgacagcaggggtcttgtgcttcctgggtacaagtacctcggacccttcaacggactcgacaagggagagccggtcaacgaggcagacgccgcggccctcgagcacgacaaagcctacgaccggcagctcgacagcggagacaacccgtacctcaagtacaaccacgccgacgcggagtttcaggagcgccttaaagaagatacgtcttttgggggcaacctcggacgagcagtcttccaggcgaaaaagagggttcttgaacctctgggcctggttgaggaacctgttaagacggctccgggaaaaaagaggccggtagagcactctcctgtggagccagactcctcctcgggaaccggaaaggcgggccagcagcctgcaagaaaaagattgaattttggtcagactggagacgcagactcagtacctgacccccagcctctcggacagccaccagcagccccctctggtctgggaactaatacgatggctacaggcagtggcgcaccaatggcagacaataacgagggcgccgacggagtgggtaattcctcgggaaattggcattgcgattccacatggatgggcgacagagtcatcaccaccagcacccgaacctgggccctgcccacctacaacaaccacctctacaaacaaatttccagccaatcaggagcctcgaacgacaatcactactttggctacagcaccccttgggggtattttgacttcaacagattccactgccacttttcaccacgtgactggcaaagactcatcaacaacaactggggattccgacccaagagactcaacttcaagctctttaacattcaagtcaaagaggtcacgcagaatgacggtacgacgacgattgccaataaccttaccagcacggttcaggtgtttactgactcggagtaccagctcccgtacgtcctcggctcggcgcatcaaggatgcctcccgccgttcccagcagacgtcttcatggtgccacagtatggatacctcaccctgaacaacgggagtcaggcagtaggacgctcttcattttactgcctggagtactttccttctcagatgctgcgtaccggaaacaactttaccttcagctacacttttgaggacgttcctttccacagcagctacgctcacagccagagtctggaccgtctcatgaatcctctcatcgaccagtacctgtattacttgagcagaacaaacactccaagtggaaccaccacgcagtcaaggcttcagttttctcaggccggagcgagtgacattcgggaccagtctaggaactggcttcctggaccctgttaccgccagcagcgagtatcaaagacatctgcggataacaacaacagtgaatactcgtggactggagctaccaagtaccacctcaatggcagagactctctggtgaatccgggcccggccatggcaagccacaaggacgatgaagaaaagttttttcctcagagcggggttctcatctttgggaagcaaggctcagagaaaacaaatgtggacattgaaaaggtcgtgattacagacgaagaggaaatcaggacaaccaatcccgtggctacggagcagtatggttctgtatctaccaacctccagagaggcaacagacaagcagctaccgcagatgtcaacacacaaggcgttcttccaggcatggtctggcaggacagagatgtgtaccttcaggggcccatctgggcaaagattccacacacggacggacattttcacccctctcccctcatgggtggattcggacttaaacaccctcctccacagattctcatcaagaacaccccggtacctgcgaatccttcgaccaccttcagtgcggcaaagtttgcttccttcatcacacagtactccacgggacaggtcagcgtggagatcgagtgggagctgcagaaggaaaacagcaaacgctggaatcccgaaattcagtacacttccaactacaacaagtctgttaatgtggactttactgtggacactaatggcgtgtattcagagcctcgccccattggcaccagatacctgactcgtaatctgtaa

SEQ ID NO: 4292 - DNA, 2208 bp, Artificial Sequence
  Description of Artificial Sequence: Synthetic polynucleotide
atggctgccgatggttatcttccagattggctcgaggacactctctctgaaggaataagacagtggtggaagctcaaacctggcccaccaccaccaaagcccgcagagcggcataaggacgacagcaggggtcttgtgcttcctgggtacaagtacctcggacccttcaacggactcgacaagggagagccggtcaacgaggcagacgccgcggccctcgagcacgacaaagcctacgaccggcagctcgacagcggagacaacccgtacctcaagtacaaccacgccgacgcggagtttcaggagcgccttaaagaagatacgtcttttgggggcaacctcggacgagcagtcttccaggcgaaaaagagggttcttgaacctctgggcctggttgaggaacctgttaagacggctccgggaaaaaagaggccggtagagcactctcctgtggagccagactcctcctcgggaaccggaaaggcgggccagcagcctgcaagaaaaagattgaattttggtcagactggagacgcagactcagtacctgacccccagcctctcggacagccaccagcagccccctctggtctgggaactaatacgatggctacaggcagtggcgcaccaatggcagacaataacgagggcgccgacggagtgggtaattcctcgggaaattggcattgcgattccacatggatgggcgacagagtcatcaccaccagcacccgaacctgggccctgcccacctacaacaaccacctctacaaacaaatttccagccaatcaggagcctcgaacgacaatcactactttggctacagcaccccttgggggtattttgacttcaacagattccactgccacttttcaccacgtgactggcaaagactcatcaacaacaactggggattccgacccaagagactcaacttcaagctctttaacattcaagtcaaagaggtcacgcagaatgacggtacgacgacgattgccaataaccttaccagcacggttcaggtgtttactgactcggagtaccagctcccgtacgtcctcggctcggcgcatcaaggatgcctcccgccgttcccagcagacgtcttcatggtgccacagtatggatacctcaccctgaacaacgggagtcaggcagtaggacgctcttcattttactgcctggagtactttccttctcagatgctgcgtaccggaaacaactttaccttcagccacacttttgaggacgttcctttccacagcagctacgctcacagccagagtctggaccgtctcatgaatcctctcatcgaccagtacctgtattacttgagcagaacaaacactccaagtggaaccaccacgcagtcaaggcttcagttttctcaggccggagcgagtgacattcgggaccagtctaggaactggcttcctggaccctgttaccgccagcagcgagtatcaaagacatctgcggataacaacaacagtgaatactcgtggactggagctaccaagtaccacctcaatggcagagactctctggtgaatccgggcccggccatggcaagccacaaggacgatgaagaaaagttttttcctcagagcggggttctcatctttgggaagcaaggctcagagaaaacaaatgtggacattgaaaaggtcatgattacagacgaagaggaaatcaggacaaccaatcccgtggctacggagcagtatggttctgtatctaccaacctccagagaggcaacagacaagcagctaccgcagatgtcaacacacaaggcgttcttccaggcatggtctggcaggacagagatgtgtaccttcaggggcccatctgggcaaagattccacacacggacggacattttcacccctctcccctcatgggtggattcggacttaaacaccctcctccacagattctcatcaagaacaccccggtacctgcgaatccttcgaccaccttcagtgcggcaaagtttgcttccttcatcacacagtactccacgggacaggtcagcgtggagatcgagtgggagctgcagaaggaaaacagcaaacgctggaatcccgaaattcagtacacttccaactacaacaagtctgttaatgtggactttactgtggacactaatggcgtgtattcagagcctcgccccattggcaccagatacctgactcgtaatctgtaa

SEQ ID NO: 4293 - DNA, 2208 bp, Artificial Sequence
  Description of Artificial Sequence: Synthetic polynucleotide
atggctgccgatggttatcttccagattggctcgaggacactctctctgaaggaataagacagtggtggaagctcaaacctggcccaccaccaccaaagcccgcagagcggcataaggacgacagcaggggtcttgtgcttcctgggtacaagtacctcggacccttcaacggactcgacaagggagagccggtcaacgaggcagacgccgcggccctcgagcacgacaaagcctacgaccggcagctcgacagcggagacaacccgtacctcaagtacaaccacgccgacgcggagtttcaggagcgccttaaagaagatacgtcttttgggggcaacctcggacgagcagtcttccaggcgaaaaagagggttcttgaacctctgggcctggttgaggaacctgttaagacggctccgggaaaaaagaggccggtagagcactctcctgtggagccagactcctcctcgggaaccggaaaggcgggccagcagcctgcaagaaaaagattgaattttggtcagactggagacgcagactcagtacctgacccccagcctctcggacagccaccagcagccccctctggtctgggaactaatacgatggctacaggcagtggcgcaccaatggcagacaataacgagggcgccgacggagtgggtaattcctcgggaaattggcattgcgattccacatggatgggcggcagagtcatcaccaccagcacccgaacctgggccctgcccacctacaacaaccacctctacaaacaaatttccagccaatcaggagcctcgaacgacaatcactactttggctacagcaccccttgggggtattttgacttcaacagattccactgccacttttcaccacgtgactggcaaagactcatcaacaacaactggggattccgacccaagagactcaacttcaagctctttaacattcaagtcaaagaggtcacgcagaatgacggtacgacgacgattgccaataaccttaccagcacggttcaggtgtttactgactcggagtaccagctcccgtacgtcctcggctcggcgcatcaaggatgcctcccgccgttcccagcagacgtcttcatggtgccacagtatggatacctcaccctgaacaacgggagtcaggcagtaggacgctcttcattttactgcctggagtactttccttctcagatgctgcgtaccggaaacaactttaccttcagctacacttttgaggacgttcctttccacagcagctacgctcacagccagagtctggaccgtctcatgaatcctctcatcgaccagtacctgtattacttgagcagaacaaacactccaagtggaaccaccacgcagtcaaggcttcagttttctcaggccggagcgagtgacattcgggaccagtctaggaactggcttcctggaccctgttaccgccagcagcgagtatcaaagacatctgcggataacaacaacagtgaatactcgtggactggagctaccaagtaccacctcaatggcagagactctctggtgaatccgggcccggccatggcaagccacaaggacgatgaagaaaagttttttcctcagagcggggttctcatctttgggaagcaaggctcagagaaaacaaatgtggacattgaaaaggtcatgattacagacgaagaggaaatcaggacaaccaatcccgtggctacggagcagtatggttctgtatctaccaacctccagagaggcaacagacaagcagctaccgcagatgtcaacacacaaggcgttcttccaggcatggtctggcaggacagagatgtgtaccttcaggggcccatctgggcaaagattccacacacggacggacattttcacccctctcccctcatgggtggattcggacttaaacaccctcctccacagattctcatcaagaacaccccggtacctgcgaatccttcgaccaccttcagtgcggcaaagtttgcttccttcatcacacagtactccacgggacaggtcagcgtggagatcgagtgggagctgcagaaggaaaacagcaaacgctggaatcccgaaattcagtacacttccaactacaacaagtctgttaatgtggactttactgtggacactaatggcgtgtattcagagcctcgccccattggcaccagatacctgactcgtaatctgtaa

SEQ ID NO: 4294 - DNA, 2208 bp, Artificial Sequence
  Description of Artificial Sequence: Synthetic polynucleotide
atggctgccgatggttatcttccagattggctcgaggacactctctctgaaggaataagacagtggtggaagctcaaacctggcccaccaccaccaaagcccgcagagcggcataaggacgacagcaggggtcttgtgcttcctgggtacaagtacctcggacccttcaacggactcgacaagggagagccggtcaacgaggcagacgccgcggccctcgagcacgacaaagcctacgaccggcagctcgacagcggagacaacccgtacctcaagtacaaccacgccgacgcggagtttcaggagcgccttaaagaagatacgtcttttgggggcaacctcggacgagcagtcttccaggcgaaaaagagggttcttgaacctctgggcctggttgaggaacctgttaagacggctccgggaaaaaagaggccggtagagcactctcctgtggagccagactcctcctcgggaaccggaaaggcgggccagcagcctgcaagaaaaagattgaattttggtcagactggagacgcagactcagtacctgacccccagcctctcggacagccaccagcagccccctctggtctgggaactaatacgatggctacaggcagtggcgcaccaatggcagacaataacgagggcgccgacggagtgggtaattcctcgggaaattggcattgcgattccacatggatgggcgacagagtcatcaccaccagcacccgaacctgggccctgcccacctacaacaaccacctctacaaacaaatttccagccaatcaggagcctcgaacgacaatcactactttggctacagcaccccttgggggtattttgacttcaacagattccactgccacttttcaccacgtgactggcaaagactcatcaacaacaactggggattccgacccaagagacccaacttcaagctctttaacattcaagtcaaagaggtcacgcagaatgacggtacgacgacgattgccaataaccttaccagcacggttcaggtgtttactgactcggagtaccagctcccgtacgtcctcggctcggcgcatcaaggatgcctcccgccgttcccagcagacgtcttcatggtgccacagtatggatacctcaccctgaacaacgggagtcaggcagtaggacgctcttcattttactgcctggagtactttccttctcagatgctgcgtaccggaaacaactttaccttcagctacacttttgaggacgttcctttccacagcagctacgctcacagccagagtctggaccgtctcatgaatcctctcatcgaccagtacctgtattacttgagcagaacaaacactccaagtggaaccaccacgcagtcaaggcttcagttttctcaggccggagcgagtgacattcgggaccagtctaggaactggcttcctggaccctgttaccgccagcagcgagtatcaaagacatctgcggataacaacaacagtgaatactcgtggactggagctaccaagtaccacctcaatggcagagactctctggtgaatccgggcccggccatggcaagccacaaggacgatgaagaaaagttttttcctcagagcggggttctcatctttgggaagcaaggctcagagaaaacaaatgtggacattgaaaaggtcatgactacagacgaagaggaaatcaggacaaccaatcccgtggctacggagcagtatggttctgtatctaccaacctccagagaggcaacagacaagcagctaccgcagatgtcaacacacaaggcgttcttccaggcatggtctggcaggacagagatgtgtaccttcaggggcccatctgggcaaagattccacacacggacggacattttcacccctctcccctcatgggtggattcggacttaaacaccctcctccacagattctcatcaagaacaccccggtacctgcgaatccttcgaccaccttcagtgcggcaaagtttgcttccttcatcacacagtactccacgggacaggtcagcgtggagatcgagtgggagctgcagaaggaaaacagcaaacgctggaatcccgaaattcagtacacttccaactacaacaagtctgttaatgtggactttactgtggacactaatggcgtgtattcagagcctcgccccattggcaccagatacctgactcgtaatctgtaa

SEQ ID NO: 4295 - DNA, 2208 bp, Artificial Sequence
  Description of Artificial Sequence: Synthetic polynucleotide
atggctgccgatggttatcttccagattggctcgaggacactctctctgaaggaataagacagtggtggaagctcaaacctggcccaccaccaccaaagcccgcagagcggcataaggacgacagcaggggtcttgtgcttcctgggtacaagtacctcggacccttcaacggactcgacaagggagagccggtcaacgaggcagacgccgcggccctcgagcacgacaaagcctacgaccggcagctcgacagcggagacaacccgtacctcaagtacaaccacgccgacgcggagtttcgggagcgccttaaagaagatacgtcttttgggggcaacctcggacgagcagtcttccaggcgaaaaagagggttcttgaacctctgggcctggttgaggaacctgttaagacggctccgggaaaaaagaggccggtagagcactctcctgtggagccagactcctcctcgggaaccggaaaggcgggccagcagcctgcaagaaaaagattgaattttggtcagactggagacgcagactcagtacctgacccccagcctctcggacagccaccagcagccccctctggtctgggaactaatacgatggctacaggcagtggcgcaccaatggcagacaataacgagggcgccgacggagtgggtaattcctcgggaaattggcattgcgattccacatggatgggcgacagagtcatcaccaccagcacccgaacctgggccctgcccacctacaacaaccacctctacaaacaaatttccagccaatcaggagcctcgaacgacaatcactactttggctacagcaccccttgggggtattttgacttcaacagattccactgccacttttcaccacgtgactggcaaagactcatcaacaacaactggggattccgacccaagagactcaacttcaagctctttaacattcaagtcaaagaggtcacgcagaatgacggtacgacgacgattgccaataaccttaccagcacggttcaggtgtttactgactcggagtaccagctcccgtacgtcctcggctcggcgcatcaaggatgcctcccgccgttcccagcagacgtcttcatggtgccacagtatggatacctcaccctgaacaacgggagtcaggcagtaggacgctcttcattttactgcctggagtactttccttctcagatgctgcgtaccggaaacaactttaccttcagctacacttttgaggacgttcctttccacagcagctacgctcacagccagagtctggaccgtctcatgaatcctctcatcgaccagtacctgtattacttgagcagaacaaacactccaagtggaaccaccacgcagtcaaggcttcagttttctcaggccggagcgagtgacattcgggaccagtctaggaactggcttcctggaccctgttaccgccagcagcgagtatcaaagacatctgcggataacaacaacagtgaatactcgtggactggagctaccaagtaccacctcaatggcagagactctctggtgaatccgggcccggccatggcaagccacaaggacgatgaagaaaagttttttcctcagagcggggttctcatctttgggaagcaaggctcagagaaaacaaatgtggacattgaaaaggtcatgactacagacgaagaggaaatcaggacaaccaatcccgtggctacggagcagtatggttctgtatctaccaacctccagagaggcaacagacaagcagctaccgcagatgtcaacacacaaggcgttcttccaggcatggtctggcaggacagagatgtgtaccttcaggggcccatctgggcaaagattccacacacggacggacattttcacccctctcccctcatgggtggattcggacttaaacaccctcctccacagattctcatcaagaacaccccggtacctgcgaatccttcgaccaccttcagtgcggcaaagtttgcttccttcatcacacagtactccacgggacaggtcagcgtggagatcgagtgggagctgcagaaggaaaacagcaaacgctggaatcccgaaattcagtacacttccaactacaacaagtctgttaatgtggactttactgtggacactaatggcgtgtattcagagcctcgccccattggcaccagatacctgactcgtaatctgtaa

SEQ ID NO: 4296 - DNA, 2208 bp, Artificial Sequence
  Description of Artificial Sequence: Synthetic polynucleotide
atggctgccgatggttatcttccagattggctcgaggacactctctctgaaggaataagacagtggtggaagctcaaacctggcccaccaccaccaaagcccgcagagcggcataaggacgacagcaggggtcttgtgcttcctgggtacaagtacctcggacccttcaacggactcgacaagggagagccggtcaacgaggcagacgccgcggccctcgagcacgacaaagcctacgaccggcagctcgacagcggagacaacccgtacctcaagtacaaccacgccgacgcggagtttcaggagcgccttaaagaagatacgtcttttgggggcaacctcggacgagcagtcttccaggcgaaaaagagggttcttgaacctctgggcctggttgaggaacctgttaagacggctccgggaaaaaagaggccggtagagcactctcctgtggagccagacccctcctcgggaaccggaaaggcgggccagcagcctgcaagaaaaagattgaattttggtcagactggagacgcagactcagtacctgacccccagcctctcggacagccaccagcagccccctctggtctgggaactaatacgatggctacaggcagtggcgcaccaatggcagacaataacgagggcgccgacggagtgggtaattcctcgggaaattggcattgcgattccacatggatgggcgacagagtcatcaccaccagcacccgaacctgggccctgcccacctacaacaaccacctctacaaacaaatttccagccaatcaggagcctcgaacgacaatcactactttggctacagcaccccttgggggtattttgacttcaacagattccactgccacttttcaccacgtgactggcaaagactcatcaacaacaactggggattccgacccaagagactcaacttcaagctctttaacattcaagtcaaagaggtcacgcagaatgacggtacgacgacgattgccaataaccttaccagcacggttcaggtgtttactgactcggagtaccagctcccgtacgtcctcggctcggcgcatcaaggatgcctcccgccgttcccagcagacgtcttcatggtgccacagtatggatacctcaccctgaacaacgggagtcaggcagtaggacgctcttcattttactgcctggagtactttccttctcagatgctgcgtaccggaaacaactttaccttcagctacacttttgaggacgttcctttccacagcagctacgctcacagccagagtctggaccgtctcatgaatcccctcatcgaccagtacctgtattacttgagcagaacaaacactccaagtggaaccaccacgcagtcaaggcttcagttttctcaggccggagcgagtgacattcgggaccagtctaggaactggcttcctggaccctgttaccgccagcagcgagtatcaaagacatctgcggataacaacaacagtgaatactcgtggactggagctaccaagtaccacctcaatggcagagactctctggtgaatccgggcccggccatggcaagccacaaggacgatgaagaaaagttttttcctcagagcggggttctcatctttgggaagcaaggctcagagaaaacaaatgtggacattgaaaaggtcatgattacagacgaagaggaaatcaggacaaccaatcccgtggctacggagcagtatggttctgtatctaccaacctccagagaggcaacagacaagcagctaccgcagatgtcaacacacaaggcgttcttccaggcatggtctggcaggacagagatgtgtaccttcaggggcccatctgggcaaagattccacacacggacggacattttcacccctctcccctcatgggtggattcggacttaaacaccctcctccacagattctcatcaagaacaccccggtacctgcgaatccttcgaccaccttcagtgcggcaaagtttgcttccttcatcacacagtactccacgggacaggtcagcgtggagatcgagtgggagctgcagaaggaaaacagcaaacgctggaatcccgaaattcagtacacttccaactacaacaagtctgttaatgtggactttactgtggacactaatggcgtgtattcagagcctcgccccattggcaccagatacctgactcgtaatctgtaa

SEQ ID NO: 4297 - DNA, 2208 bp, Artificial Sequence
  Description of Artificial Sequence: Synthetic polynucleotide
atggctgccgatggttatcttccagattggctcgaggacactctctctgaaggaataagacagtggtggaagctcaaacctggcccaccaccaccaaagcccgcagagcggcataaggacgacagcaggggtcttgtgcttcctgggtacaagtacctcggacccttcaacggactcgacaagggagagccggtcaacgaggcagacgccgcggccctcgagcacgacaaagcctacgaccggcagctcgacagcggagacaacccgtacctcaagtacaaccacgccgacgcggagtttcaggagcgccttaaagaagatacgtcttttgggggcaacctcggacgagcagtcttccaggcgaaaaagagggttcttgaacctctgggcctggttgaggaacctgttaagacggctccgggaaaaaagaggccggtagagcactctcctgtggagccagactcctcctcgggaaccggaaaggcgggccagcagcctgcaagaaaaagattgaattttggtcagactggagacgcagactcagtacctgacccccagcctctcggacagccaccagcagccccctctggtctgggaactaatacgatggctacaggcagtggcgcaccaatggcagacaataacgagggcgccgacggagtgggtaattcctcgggaaattggcattgcgattccacatggatgggcgacagagtcatcaccaccagcacccgaacctgggccctgcccacctacaacaaccacctctacaaacaaatttccagccaatcaggagcctcgaacgacaatcactactttggctacagcaccccttgggggtattttgacttcaacagattccactgccacttttcaccacgtgactggcaaagactcatcaacaacaactggggattccgacccaagagactcaacttcaagctctttaacattcaagtcaaagaggtcacgcagaatgacggtacgacgacgattgccaataaccttaccagcacggttcaggtgtttactgactcggagtaccagctcccgtacgtcctcggctcggcgcatcaaggatgcctcccgccgttcccagcagacgtcttcatggtgccacagtatggatacctcaccctgaacaacgggagtcaggcagtaggacgctcttcattttactgcctggagtactttccttctcagatgctgcgtaccggaaacaactttaccttcagctacacttttgaggacgttcctttccacagcagctacgctcacagccagagtctggaccgtctcatgaatcctctcatcgaccagtacctgtattacttgagcagaacaaacactccaagtggaaccaccacgcagtcaaggcttcagttttctcaggccggagcgagtgacattcgggaccagtctaggaactggcttcctggaccctgttaccgccagcagcgagtatcaaagacatctgcggataacaacaacagtgaatactcgtggactggagctaccaagtaccacctcaatggcagagactctctggtgaatccgggcccggccatggcaagccacaaggacgatgaagaaaagttttttcctcagagcggggttctcatctttgggaagcaaggctcagagaaaacaaatgtggacattgaaaaggtcatgattacagacgaagaggaaatcaggacaaccaatcccgtggctacggagcagtatggttctgtatctaccaacctccagagaggcaacagacaagcagctaccgcagatgtcaacacacaaggcgttcttccaggcatggtctggcaggacagagatgtgtaccttcaggggcccatctgggcaaagattccacacacggacggacattttcacccctctcccctcatgggtggattcggacttaaacaccctcctccacagattctcatcaagaacaccccggtacctgcgaatccttcgaccaccttcagtgcggcaaagtttgcttccttcatcacacagtactccacgggacaggtcagcgtggagatcgagtgggagctgcagaaggaaaacagcaaacgctggaatcccgaaattcagtacacttccaactacaacaagtctgttaatgtggactttactgtggacactaatggcgtgtattcagagtctcgccccattggcaccagatacctgactcgtaatctgtaa

SEQ ID NO: 4298 - DNA, 2208 bp, Artificial Sequence
  Description of Artificial Sequence: Synthetic polynucleotide
atggctgccgatggttatcttccagattggctcgaggacactctctctgaaggaataagacagtggtggaagctcaaacctggcccaccaccaccaaagcccgcagagcggcataaggacgacagcaggggtcttgtgcttcctgggtacaagtacctcggacccttcaacggactcgacaagggagagccggtcaacgaggcagacgccgcggccctcgagcacgacaaagcctacgaccggcagctcgacagcggagacaacccgtacctcaagtacaaccacgccgacgcggagtttcaggagcgccttaaagaagatacgtcttttgggggcaacctcggacgagcagtcttccaggcgaaaaagagggttcttgaacctctgggcctggttgaggaacctgttaagacggctccgggaaaaaagaggccggtagagcactctcctgtggagccagactcctcctcgggaaccggaaaggcgggccagcagcctgcaagaaaaagattgaattttggtcagactggagacgcagactcagtacctgacccccagcctctcggacagccaccagcagccccctctggtctgggaactaatacgatggctacaggcagtggcgcaccaatggcagacaataacgagggcgccgacggagtgggtaattcctcgggaaattggcattgcgattccacatggatgggcgacagagtcatcaccaccagcacccgaacctgggccctgcccacctacaacaaccacctctacaaacaaatttccagccaatcaggagcctcgaacgacaatcactactttggctacagcaccccttgggggtattttgacttcaacagattccactgccacttttcaccacgtgactggcaaagactcatcaacaacaactggggattccgacccaagagactcaacttcaagctctttaacattcaagtcaaagaggtcacgcagaatgacggtacgacgacgattgccaataaccttaccagcacggttcaggtgtttactgactcggagtaccagctcccgtacgtcctcggctcggcgcatcaaggatgcctcccgccgttcccagcagacgtcttcatggtgccacagtatggatacctcaccccgaacaacgggagtcaggcagtaggacgctcttcattttactgcctggagtactttccttctcagatgctgcgtaccggaaacaactttaccttcagctacacttttgaggacgttcctttccacagcagctacgctcacagccagagtctggaccgtctcatgaatcctctcatcgaccagtacctgtattacttgagcagaacaaacactccaagtggaaccaccacgcagtcaaggcttcagttttctcaggccggagcgagtgacattcgggaccagtctaggaactggcttcctggaccctgttaccgccagcagcgagtatcaaagacatctgcggataacaacaacagtgaatactcgtggactggagctaccaagtaccacctcaatggcagagactctctggtgaatccgggcccggccatggcaagccacaaggacgatgaagaaaagttttttcctcagagcggggttctcatctttgggaagcaaggctcagagaaaacaaatgtggacattgaaaaggtcatgattacagacgaagaggaaatcaggacaaccaatcccgtggctacggagcagtatggttctgtatctaccaacctccagagaggcaacagacaagcagctaccgcagatgtcaacacacaaggcgttcttccaggcatggtctggcaggacagagatgtgtaccttcaggggcccatctgggcaaagattccacacacggacggacattttcacccctctcccctcatgggtggattcggacttaaacaccctcctccacagattctcatcaagaacaccccggtacctgcgaatccttcgaccaccttcagtgcggcaaagtttgcttccttcatcacacagtactccacgggacaggtcagcgtggagatcgagtgggagctgcagaaggaaaacagcaaacgctggaatcccgaaattcagtacacttccaactacaacaagtctgttaatgtggactttactgtggacactaatggcgtgtattcagagcctcgccccattggcaccagatacctgactcgtaatctgtaa

SEQ ID NO: 4299 - DNA, 2208 bp, Artificial Sequence
  Description of Artificial Sequence: Synthetic polynucleotide
atggctgccgatggttatcttccagattggctcgaggacactctctctgaaggaataagacagtggtggaagctcaaacctggcccaccaccaccaaagcccgcagagcggcataaggacgacagcaggggtcttgtgcttcctgggtacaagtacctcggacccttcaacggactcgacaagggagagccggtcaacgaggcagacgccgcggccctcgagcacgacaaagcctacgaccggcagctcgacagcggagacaacccgtacctcaagtacaaccacgccgacgcggagtttcaggagcgccttaaagaagatacgtcttttgggggcaacctcggacgagcagtcttccaggcgaaaaagagggttcttgaacctctgggcctggttgaggaacctgttaagacggctccgggaaaaaagaggccggtagagcactctcctgtggagccagactcctcctcgggaaccggaaaggcgggccagcagcctgcaagaaaaagattgaattttggtcagactggagacgcagactcagtacctgacccccagcctctcggacagccaccagcagccccctctggtctgggaactaatacgatggctacaggcagtggcgcaccaatggcagacaataacgagggcgccgacggagtgggtaattcctcgggaaattggcattgcgattccacatggatgggcgacagagtcatcaccaccagcacccgaacctgggccctgcccacctacaacaaccacctctacaaacaaatttccagccaatcaggagcctcgaacgacaatcactactttggctacagcaccccttgggggtattttgacttcaacagattccactgccacttttcaccacgtgactggcaaagactcatcaacaacaactggggattccgacccaagagactcaacttcaagctctttaacattcaagtcaaagaggtcacgcagaatgacggtacgacgacgattgccaataaccttaccagcacggttcaggtgtttactgactcggagtaccagctcccgtacgtcctcggctcggcgcatcaaggatgcctcccgccgttcccagcagacgtcttcatggtgccacagtatggatacctcaccctgaacaacgggagtcaggcagtaggacgctcttcattttactgcctggagtactttccttctcagatgctgcgtaccggaaacaactttaccttcagctacacttttgaggacgttcctttccacagcagctacgctcacagccagagtctggaccgtctcatgaatcctctcatcgaccagtacctgtattacttgagcagaacaaacactccaagtggaaccaccacgcagtcaaggcttcagttttctcaggccggagcgagtgacattcgggaccagtctaggaactggcttcctggaccctgttaccgccagcagcgagtatcaaagacatctgcggataacaacaacagtgaatactcgtggactggagctaccaagtaccacctcaatggcagagactctctggtgaatccgggcccggccatggcaagccacaaggacgatgaagaaaagttttttcctcagagcggggttctcatctttgggaagcaaggctcagagaaaacaaatgtggacattgaaaaggtcatgattacagacgaagaggaaatcaggacaaccaatcccgtggctacggagcagtatggttctgtatctaccaacctccagagaggcaacagacaagcagctaccgcagatgtcaacacacaaggcgttcttccaggcatggcctggcaggacagagatgtgtaccttcaggggcccatctgggcaaagattccacacacggacggacattttcacccctctcccctcatgggtggattcggacttaaacaccctcctccacagattctcatcaagaacaccccggtacctgcgaatccttcgaccaccttcagtgcggcaaagtttgcttccttcatcacacagtactccacgggacaggtcagcgtggagatcgagtgggagctgcagaaggaaaacagcaaacgctggaatcccgaaattcagtacacttccaactacaacaagtctgttaatgtggactttactgtggacactaatggcgtgtattcagagcctcgccccattggcaccagatacctgactcgtaatctgtaa

SEQ ID NO: 4300 - DNA, 2208 bp, Artificial Sequence
  Description of Artificial Sequence: Synthetic polynucleotide
atggctgccgatggttatcttccagattggctcgaggacactctctctgaaggaataagacagtggtggaagctcaaacctggcccaccaccgccaaagcccgcagagcggcacaaggacgacagtaggggtcttgtgcttcctgggtacaagtacctcggacccttcaacggactcgacaaaggagagccggtcaacgaggcagacgccgcggccctcgagcacgacaaggcctacgaccggcagctcgacagcggagacaacccgtacctcaagtacaaccacgccgacgcggagtttcaggagcgtcttaaagaagatacgtcttttgggggcaacctcggacgagcagtattccaggcgaaaaagagggttcttgaacctctgggcctggttgaggagcctgttaagacggctccgggaaaaaagaggccggtagagcactctcctgtggagccagactcctcctcgggaaccggaaaagcgggccagcagcctgcaagaaaaagattgaattttggtcagactggagacgcagactccgtacctgacccccagcctctcggacagccaccagcagcccccacaagtttgggatctactacaatggctacaggcagtggcgcaccaatggcagacaataacgagggtgccgatggagtgggtaattcctcaggaaattggcattgcgattcccaatggctgggcgacagagtcatcaccaccagcacccgaacctgggccctgcccacctacaacaaccacctctacaagcaaatctccagccaatcaggagcatcgaacgacaaccactactttggccacagcaccccttgggggtattttgacttcaacagattccactgtcacttctccccacgtgactggcaaagactcatcaacaacaactggggattccgacccaagagactcaacttcaagctctttaacattcaagtcaaagaggtcacgcagaatgacggtacgacgacgattgccaataaccttaccagcacggttcaggtgtttactgactcggagtaccagctcccgtacgtcctcggctcggcgcatcaaggatgcctcccgccgttcccagcagacgtcttcatggtcccacagtatggatacctcaccctgaacaacgggagtcaggcggtaggacgctcttccttttactgcctggagtactttccttctcagatgctgcgtaccggaaacaactttaccttcagctacacttttgaggacgttcctttccacagcagctacgctcacagccagagtctggaccgtctcatgaatcctctcatcgaccagtacctgtattacttgagcagaacaaacactccaagtggaaccaccacgcagtcaaggcttcagttttctcaggccggagcgagtgacattcgggaccagtctaggaactggcttcctggaccctgttaccgccagcagcgagtatcaaagacatctgcggataacaacaacagtgaatactcgtggactggagctaccaagtaccacctcaatggcagagactctctggtgaatccgggcccggccatggcaagccacaaggacgatgaagaaaagttttttcctcagagcggggttctcatctttgggaagcaaggctcagagaaaacaaatgtggacattgaaaaggtcatgattacagacgaagaggaaatcaggacaaccaatcccgtggctacggagcagtatggttctgtatctaccaacctccagagaggcaacagacaagcagctaccgcagatgtcaacacacaaggcgttcttccaggcatggtctggcaggacagagatgtgtaccttcaggggcccatctgggcaaagattccacacacggacggacattttcacccctctcccctcatgggtggattcggacttaaacaccctcctccacagattctcatcaagaacaccccggtacctgcgaatccttcgaccaccttcagtgcggcaaagtttgcttccttcatcacacagtactccacgggacaggtcagcgtggagatcgagtgggagctgcagaaggaaaacagcaaacgctggaatcccgaaattcagtacacttccaactacaacaagtctgttaatgtggactttactgtggacactaatggcgtgtattcagagcctcgccccattggcaccagatacctgactcgtaatctgtaa

SEQ ID NO: 4301 - DNA, 2208 bp, Artificial Sequence
  Description of Artificial Sequence: Synthetic polynucleotide
atggctgccgatggttatcttccagattggctcgaggacactctctctgaaggaataagacagtggtggaagctcaaacctggcccaccaccaccaaagcccgcagagcggcataaggacgacagcaggggtcttgtgcttcctgggtacaagtacctcggacccttcaacggactcgacaagggagagccggtcaacgaggcagacgccgcggccctcgagcacgacaaagcctacgaccggcagctcgacagcggagacaacccgtacctcaagtacaaccacgccgacgcggagtttcaggagcgccttaaagaagatacgtcttttgggggcaacctcggacgagcagtcttccaggcgaaaaagagggttcttgaacctctgggcctggttgaggaacctgttaagacggctccgggaaaaaagaggccggtagagcactctcctgtggagccagactcctcctcgggaaccggaaaggcgggccagcagcctgcaagaaaaagattgaattttggtcagactggagacgcagactcagtacctgacccccagcctctcggacagccaccagcagccccctctggtctgggaactaatacgatggctacaggcagtggcgcaccaatggcagacaataacgagggcgccgacggagtgggtaattcctcgggaaattggcattgcgattccacatggatgggcgacagagtcatcaccaccagcacccgaacctgggccctgcccacctacaacaaccacctctacaaacaaatttccagccaatcaggagcctcgaacgacaatcactactttggctacagcaccccttgggggtattttgacttcaacagattccactgccacttttcaccacgtgactggcaaagactcatcaacaacaactggggattccgacccaagagactcaacttcaagctctttaacattcaagtcaaagaggtcacgcagaatgacggtacgacgacgattgccaataaccttaccagcacggttcaggtgtttactgactcggagtaccagctcccgtacgtcctcggctcggcgcatcaaggatgcctcccgccgttcccagcagacgtcttcatggtgccacagtatggatacctcaccctgaacaacgggagtcaggcagtaggacgctcttcattttactgcctggagtactttccttctcagatgctgcgtaccggaaacaactttaccttcagctacacttttgaggacgttcctttccacagcagctacgctcacagccagagtctggaccgtctcatgaatcctctcatcgaccagtacctgtattacttgagcagaacaaacactccaagtggaaccaccacgcagtcaaggcttcagttttctcaggccggagcgagtgacattcgggaccagtctaggaactggcttcctggaccctgttaccgccagcagcgagtatcaaagacatctgcggataacaacaacagtgaatactcgtggactggagctaccaagtaccacctcaatggcagagactctctggtgaatccgggcccggccatggcaagccacaaggacgatgaagaaaagttttttcctcagagcggggttctcatctttgggaagcaaggctcagagaaaacaaatgtggacattgaaaaggtcatgattacagacgaagaggaaatcaggacaaccaatcccgtggctacggagcagtatggttctgtatctaccaacctccagagaggcaacagacaagcagctaccgcagatgtcaacacacaaggcgttcttccaggcatggtctggcaggacagagatgtgtaccttcaggggcccatctgggcaaagattccacacacggacggacattttcacccctctcccctcatgggtggattcggacttaaacaccctcctccacagattctcatcaagaacaccccggtacctgcgaatccttcgaccaccttcagtgcggcaaagtttgcttccttcatcacacagtactccacgggacaggccagcgtggagatcgagtgggagctgcagaaggaaaacagcaaacgctggaatcccgaaattcagtacacttccaactacaacaagtctgttaatgtggactttactgtggacactaatggcgtgtattcagagcctcgccccattggcaccagatacctgactcgtaatctgtaa

SEQ ID NO: 4302 - DNA, 2208 bp, Artificial Sequence
  Description of Artificial Sequence: Synthetic polynucleotide
atggctgccgatggttatcttccagattggctcgaggacactctctctgaaggaataagacagtggtggaagctcaaacctggcccaccaccaccaaagcccgcagagcggcataaggacgacagcaggggtcttgtgcttcctgggtacaagtacctcggacccttcaacggactcgacaagggagagccggtcaacgaggcagacgccgcggccctcgagcacgacaaagcctacgaccggcagctcgacagcggagacaacccgtacctcaagtacaaccacgccgacgcggagtttcaggagcgccttaaagaagatacgtcttttgggggcaacctcggacgagcagtcttccaggcgaaaaagagggttcttgaacctctgggcctggttgaggaacctgttaagacggctccgggaaaaaagaggccggtagagcactctcctgtggagccagactcctcctcgggaaccggaaaggcgggccagcagcctgcaagaaaaagattgaattttggtcagactggagacgcagactcagtacctgacccccagcctctcggacagccaccagcagccccctctggtctgggaactaatacgatggctacaggcagtggcgcaccaatggcagacaataacgagggcgccgacggagtgggtaattcctcgggaaattggcattgcgattccacatggatgggcgacagagtcatcaccaccagcacccgaacctgggccctgcccacctacaacaaccacctctacaaacaaatttccagccaatcaggagcctcgaacgacaatcactactttggctacagcaccccttgggggtattttgacttcaacagattccactgccacttttcaccacgtgactggcaaagactcatcaacaacaactggggattccgacccaagagactcaacttcaagctctttaacattcaagtcaaagaggtcacgcagaatgacggtacgacgacgattgccaataaccttaccagcacggttcaggtgtttactgactcggagtaccagctcccgtacgtcctcggctcggcgcatcaaggatgcctcccgccgttcccagcagacgtcttcatggtgccacagtatggatacctcaccctgaacaacgggagtcaggcagtaggacgctcttcattttactgcctggagtactttccttctcagatgctgcgtaccggaaacaactttaccttcagctacacttttgaggacgttcctttccacagcagctacgctcacagccagagtctggaccgtctcatgaatcctctcatcgaccagtacctgtattacttgagcagaacaaacactccaagtggaaccaccacgcagtcaaggcttcagttttctcaggccggagcgagtgacattcgggaccagtctaggaactggcttcctggaccctgttaccgccagcagcgagtatcaaagacatctgcggataacaacaacagtgaatactcgtggactggagctaccaagtaccacctcaatggcagagactctctggtgaatccgggcccggccatggcaagccacaaggacgatgaagaaaagttttttcctcagagcggggttctcatctttgggaagcaaggctcagagaaaacaaatgtggacattgaaaaggtcatgattacagacgaagaggaaatcaggacaaccaatcccgtggctacggagcagtatggttctgtatctaccaacctccagagaggcaacagacaagcagctaccgcagatgtcaacacacaaggcgttcttccaggcatggtctggcaggacagagatgtgtaccttcaggggcccatctgggcaaagattccacacacggacggacattttcacccctctcccctcatgggtggattcggacttaaacaccctcctccacagattctcatcaagaacaccccggtacctgcgaatccttcgaccaccttcagtgcggcaaggtttgcttccttcatcacacagtactccacgggacaggtcagcgtggagatcgagtgggagctgcagaaggaaaacagcaaacgctggaatcccgaaattcagtacacttccaactacaacaagtctgttaatgtggactttactgtggacactaatggcgtgtattcagagcctcgccccattggcaccagatacctgactcgtaatctgtaa

SEQ ID NO: 4303 - DNA, 2208 bp, Artificial Sequence
  Description of Artificial Sequence: Synthetic polynucleotide
atggctgccgatggttatcttccagattggctcgaggacactctctctgaaggaataagacagtggtggaagctcaaacctggcccaccaccaccaaagcccgcagagcggcataaggacgacagcaggggtcttgtgcttcctgggtacaagtacctcggacccttcaacggactcgacaagggagagccggtcaacgaggcagacgccgcggccctcgagcacgacaaagcctacgaccggcagctcgacagcggagacaacccgtacctcaagtacaaccacgccgacgcggagtttcaggagcgccttaaagaagatacgtcttttgggggcaacctcggacgagcagtcttccaggcgaaaaagagggttcttgaacctctgggcctggttgaggaacctgttaagacggctccgggaaaaaagaggccggtagagcactctcctgtggagccagactcctcctcgggaaccggaaaggcgggccagcagcctgcaagaaaaagattgaattttggtcagactggaggcgcagactcagtacctgacccccagcctctcggacagccaccagcagccccctctggtctgggaactaatacgatggctacaggcagtggcgcaccaatggcagacaataacgagggcgccgacggagtgggtaattcctcgggaaattggcattgcgattccacatggatgggcgacagagtcatcaccaccagcacccgaacctgggccctgcccacctacaacaaccacctctacaaacaaatttccagccaatcaggagcctcgaacgacaatcactactttggctacagcaccccttgggggtattttgacttcaacagattccactgccacttttcaccacgtgactggcaaagactcatcaacaacaactggggattccgacccaagagactcaacttcaagctctttaacattcaagtcaaagaggtcacgcagaatgacggtacgacgacgattgccaataaccttaccagcacggttcaggtgtttactgactcggagtaccagctcccgtacgtcctcggctcggcgcatcaaggatgcctcccgccgttcccagcagacgtcttcatggtgccacagtatggatacctcaccctgaacaacgggagtcaggcagtaggacgctcttcattttactgcctggagtactttccttctcagatgctgcgtaccggaaacaactttaccttcagctacacttttgaggacgttcctttccacagcagctacgctcacagccagagtctggaccgtctcatgaatcctctcatcgaccagtacctgtattacttgagcagaacaaacactccaagtggaaccaccacgcagtcaaggcttcagttttctcaggccggagcgagtgacattcgggaccagtctaggaactggcttcctggaccctgttaccgccagcagcgagtatcaaagacatctgcggataacaacaacagtgaatactcgtggactggagctaccaagtaccacctcaatggcagagactctctggtgaatccgggcccggccatggcaagccacaaggacgatgaagaaaagttttttcctcagagcggggttctcatctttgggaagcaaggctcagagaaaacaaatgtggacattgaaaaggtcatgattacagacgaagaggaaatcaggacaaccaatcccgtggctacggagcagtatggttctgtatctaccaacctccagagaggcaacagacaagcagctaccgcagatgtcaacacacaaggcgttcttccaggcatggtctggcaggacagagatgtgtaccttcaggggcccatctgggcaaagattccacacacggacggacattttcacccctctcccctcatgggtggattcggacttaaacaccctcctccacagattctcatcaagaacaccccggtacctgcgaatccttcgaccaccttcagtgcggcaaagtttgcttccttcatcacacagtactccacgggacaggtcagcgtggagatcgagtgggagctgcagaaggaaaacagcaaacgctggaatcccgaaattcagtacacttccaactacaacaagtctgttaatgtggactttactgtggacactaatggcgtgtattcagagcctcgccccattggcaccagatacctgactcgtaatctgtaa

SEQ ID NO: 4304 - DNA, 2208 bp, Artificial Sequence
  Description of Artificial Sequence: Synthetic polynucleotide
atggctgccgatggttatcttccagattggctcgaggacactctctctgaaggaataagacagtggtggaagctcaaacctggcccaccaccaccaaagcccgcagagcggcataaggacgacagcaggggtcttgtgcttcctgggtacaagtacctcggacccttcaacggactcgacaagggagagccggtcaacgaggcagacgccgcggccctcgagcacgacaaagcctacgaccggcagctcgacagcggagacaacccgtacctcaagtacaaccacgccgacgcggagtttcaggagcgccttaaagaagatacgtcttttgggggcaacctcggacgagcagtcttccaggcgaaaaagagggttcttgaacctctgggcctggttgaggaacctgttaagacggctccgggaaaaaagaggccggtagagcactctcctgtggagccagactcctcctcgggaaccggaaaggcgggccagcagcctgcaagaaaaagattgaattttggtcagactggagacgcagactcagtacctgacccccagcctctcggacagccaccagcagccccctctggtctgggaactaatacgatggctacaggcagtggcgcaccaatggcagacaataacgagggcgccgacggagtgggtaattcctcgggaaattggcattgcgattccacatggatgggcgacagagtcatcaccaccagcacccgaacctgggccctgcccacctacaacaaccacctctacaaacaaatttccagccaatcaggagcctcgaacgacaatcactactttggctacagcaccccttgggggtattttgacttcaacagattccactgccacttttcaccacgtgactggcaaagactcatcaacaacaactggggattccgacccaagagactcaacttcaagctctttaacattcaagtcaaagaggtcacgcagaatgacggtacgacgacgattgccaataaccttaccagcacggttcaggtgtttactgactcggagtaccagctcccgtacgtcctcggctcggcgcatcaaggatgcctcccgccgttcccagcagacgtcttcatggtgccacagtatggatacctcaccctgaacaacgggagtcaggcagtaggacgctcttcattttactgcctggagtactttccttctcagatgctgcgtaccggaaacaactttaccttcagctacacttttgaggacgttcctttccacagcagctacgctcacagccagagtctggaccgtctcatgaatcctctcatcgaccagtacctgtattacttgagcagaacaaacactccaagtggaaccaccacgcagtcaaggcttcagttttctcaggccggagcgagtgacattcgggaccagtctaggaactggcttcctggaccctgttaccgccagcagcgagtatcaaagacatctgcggataacaacaacagtgaatactcgtggactggagctaccaagtaccacctcaatggcagagactctctggtgaatccgggcccggccatggcaagccacaaggacgatgaagaaaagttttttcctcagagcggggttctcatctttgggaagcaaggctcagagaaaacaaatgtggacattgaaaaggtcatgattacagacgaagaggaaatcaggacaaccaatcccgtggctacggagcagtatggttctgtatctaccaacctccagagaggcaacagacaagcagctaccgcagatgtcaacacacaaggcgttcttccaggcatggtctggcaggacagagatgtgtaccttcaggggcccatctgggcaaagattccacacacggacggacattttcacccctctcccctcatgggtggattcggacttaaacaccctcctccacagattctcatcaagaacaccccggtacctgcgaatccttcgaccaccttcagtgcggcaaagtttgcttccttcatcacacagtactccacgggacaggtcagcgtggagatcgagtgggagctgcagaaggaaaacagcaaacgctggaatcccgaaattcagtacacttccaactacaacaagtctgctaatgtggactttactgtggacactaatggcgtgtattcagagcctcgccccattggcaccagatacctgactcgtaatctgtaa

SEQ ID NO: 4305 - DNA, 2208 bp, Artificial Sequence
  Description of Artificial Sequence: Synthetic polynucleotide
atggctgccgatggttatcttccagattggctcgaggacactctctctgaaggaataagacagtggtggaagctcaaacctggcccaccaccaccaaagcccgcagagcggcataaggacgacagcaggggtcttgtgcttcctgggtacaagtacctcggacccttcaacggactcgacaagggagagccggtcaacgaggcagacgccgcggccctcgagcacgacaaagcctacgaccggcagctcgacagcggagacaacccgtacctcaagtacaaccacgccgacgcggagtttcaggagcgccttaaagaagatacgtcttttgggggcaacctcggacgagcagtcttccaggcgaaaaagagggttcttgaacctctgggcctggttgaggaacctgttaagacggctccgggaaaaaagaggccggtagagcactctcctgtggagccagactcctcctcgggaaccggaaaggcgggccagcagcctgcaagaaaaagattgaattttggtcagactggagacgcagactcagtacctgacccccagcctctcggacagccaccagcagccccctctggtctgggaactaatacgatggctacaggcagtggcgcaccaatggcagacaataacgagggcgccgacggagtgggtaattcctcgggaaattggcattgcgattccacatggatgggcgacagagtcatcaccaccagcacccgaacctgggccctgcccacctacaacaaccacctctacaaacaaatttccagccaatcaggagcctcgaacgacaatcactactttggctacagcaccccttgggggtattttgacttcaacagattccactgccacttttcaccacgtgactggcaaagactcatcaacaacaactggggattccgacccaagagactcaacttcaagctctttaacattcaagtcaaagaggtcacgcagaatgacggtacgacgacgattgccaataaccttaccagcacggttcaggtgtttactgactcggagtaccagctcccgtacgtcctcggctcggcgcatcaaggatgcctcccgccgttcccagcagacgtcttcatggtgccacagtatggatacctcaccctgaacaacgggagtcaggcagtaggacgctcttcattttactgcctggagtactttccttctcagatgctgcgtaccggaaacaactttaccttcagctacacttttgaggacgttcctttccacagcagctacgctcacagccagagtctggaccgtctcatgaatcctctcatcgaccagtacctgtattacttgagcagaacaaacactccaagtggaaccaccacgcagtcaaggcttcagttttctcaggccggagcgagtgacattcgggaccggtctaggaactggcttcctggaccctgttaccgccagcagcgagtatcaaagacatctgcggataacaacaacagtgaatactcgtggactggagctaccaagtaccacctcaatggcagagactctctggtgaatccgggcccggccatggcaagccacaaggacgatgaagaaaagttttttcctcagagcggggttctcatctttgggaagcaaggctcagagaaaacaaatgtggacattgaaaaggtcatgattacagacgaagaggaaatcaggacaaccaatcccgtggctacggagcagtatggttctgtatctaccaacctccagagaggcaacagacaagcagctaccgcagatgtcaacacacaaggcgttcttccaggcatggtctggcaggacagagatgtgtaccttcaggggcccatctgggcaaagattccacacacggacggacattttcacccctctcccctcatgggtggattcggacttaaacaccctcctccacagattctcatcaagaacaccccggtacctgcgaatccttcgaccaccttcagtgcggcaaagtttgcttccttcatcacacagtactccacgggacaggtcagcgtggagatcgagtgggagctgcagaaggaaaacagcaaacgctggaatcccgaaattcagtacacttccaactacaacaagtctgttaatgtggactttactgtggacactaatggcgtgtattcagagcctcgccccattggcaccagatacctgactcgtaatctgtaa

SEQ ID NO: 4306 - DNA, 2208 bp, Artificial Sequence
  Description of Artificial Sequence: Synthetic polynucleotide
atggctgccgatggttatcttccagattggctcgaggacactctctctgaaggaataagacagtggtggaagctcaaacctggcccaccaccaccaaagcccgcagagcggcataaggacgacagcaggggtcttgtgcttcctgggtacaagtacctcggacccttcaacggactcgacaagggagagccggtcaacgaggcagacgccgcggccctcgagcacgacaaagcctacgaccggcagctcgacagcggagacaacccgtacctcaagtacaaccacgccgacgcggagtttcaggagcgccttaaagaagatacgtcttttgggggcaacctcggacgagcagtcttccaggcgaaaaagagggttcttgaacctctgggcctggttgaggaacctgttaagacggctccgggaaaaaagaggccggtagagcactctcctgtggagccagactcctcctcgggaaccggaaaggcgggccagcagcctgcaagaaaaagattgaattttggtcagactggagacgcagactcagtacctgacccccagcctctcggacagccaccagcagccccctctggtctgggaactaatacgatggctacaggcagtggcgcaccaatggcagacaataacgagggcgccgacggagtgggtaattcctcgggaaattggcattgcgattccacatggatgggcgacagagtcatcaccaccagcacccgaacctgggccctgcccacctacaacaaccacctctacaaacaaatttccagccaatcaggagcctcgaacgacaatcactactttggctacagcaccccttgggggtattttgacttcaacagattccactgccacttttcaccacgtgactggcaaagactcatcaacaacaactggggattccgacccaagagactcaacttcaagctctttaacattcaagtcaaagaggtcacgcagaatgacggtacgacgacgattgccaataaccttaccagcacggttcaggtgtttactgactcggagtaccagctcccgtacgtcctcggctcggcgcatcaaggatgcctcccgccgttcccagcagacgtcttcatggtgccacagtatggatacctcaccctgaacaacgggagtcaggcagtaggacgctcttcattttactgcctggagtactttccttctcagatgctgcgtaccggaaacaactttaccttcagctacacttttgaggacgttcctttccacagcagctacgctcacagccagagtctggaccgtctcatgaatcctctcatcgaccagtacctgtattacttgagcagaacaaacactccaagtggaaccaccacgcagtcaaggcttcagttttctcaggccggagcgagtgacattcgggaccagtctaggaactggcttcctggaccctgttaccgccagcagcgagtatcaaaggcatctgcggataacaacaacagtgaatactcgtggactggagctaccaagtaccacctcaatggcagagactctctggtgaatccgggcccggccatggcaagccacaaggacgatgaagaaaagttttttcctcagagcggggttctcatctttgggaagcaaggctcagagaaaacaaatgtggacattgaaaaggtcatgattacagacgaagaggaaatcaggacaaccaatcccgtggctacggagcagtatggttctgtatctaccaacctccagagaggcaacagacaagcagctaccgcagatgtcaacacacaaggcgttcttccaggcatggtctggcaggacagagatgtgtaccttcaggggcccatctgggcaaagattccacacacggacggacattttcacccctctcccctcatgggtggattcggacttaaacaccctcctccacagattctcatcaagaacaccccggtacctgcgaatccttcgaccaccttcagtgcggcaaagtttgcttccttcatcacacagtactccacgggacaggtcagcgtggagatcgagtgggagctgcagaaggaaaacagcaaacgctggaatcccgaaattcagtacacttccaactacaacaagtctgttaatgtggactttactgtggacactaatggcgtgtattcagagcctcgccccattggcaccagatacctgactcgtaatctgtaa

SEQ ID NO: 4307 - DNA, 2208 bp, Artificial Sequence
  Description of Artificial Sequence: Synthetic polynucleotide
atggctgccgatggttatcttccagattggctcgaggacactctctctgaaggaataagacagtggtggaagctcaaacctggcccaccaccaccaaagcccgcagagcggcataaggacgacagcaggggtcttgtgcttcctgggtacaagtacctcggacccttcaacggactcgacaagggagagccggtcaacgaggcagacgccgcggccctcgagcacgacaaagcctacgaccggcagctcgacagcggagacaacccgtacctcaagtacaaccacgccgacgcggagtttcaggagcgccttaaagaagatacgtcttttgggggcaacctcggacgagcagtcttccaggcgaaaaagagggttcttgaacctctgggcctggttgaggaacctgttaagacggctccgggaaaaaagaggccggtagagcactctcctgtggagccagactcctcctcgggaaccggaaaggcgggccagcagcctgcaagaaaaagattgaattttggtcagactggagacgcagactcagtacctgacccccagcctctcggacagccaccagcagccccctctggtctgggaactaatacgatggctacaggcagtggcgcaccaatggcagacaataacgagggcgccgacggagtgggtaattcctcgggaaattggcattgcgattccacatggatgggcgacagagtcatcaccaccagcacccgaacctgggccctgcccacctacaacaaccacctctacaaacaaatttccagccaatcaggagcctcgaacgacaatcactactttggctacagcaccccttgggggtattttgacttcaacagattccactgccacttttcaccacgtgactggcaaagactcatcaacaacaactggggattccgacccaagagactcaacttcaagctctttaacattcaagtcaaagaggtcacgcagaatgacggtacgacgacgattgccaataaccttaccagcacggttcaggtgtttactgactcggagtaccagctcccgtacgtcctcggctcggcgcatcaaggatgcctcccgccgttcccagcagacgtcttcatggtgccacagtatggatacctcaccctgaacaacgggagtcaggcagtaggacgctcttcattttactgcctggagtactttccttctcagatgctgcgtaccggaaacaactttaccttcagctacacttttgaggacgttcctttccacagcagctacgctcacagccagagtctggaccgtctcatgaatcctctcatcgaccagtacctgtattacttgagcagaacaaacactccaagtggaaccaccacgcagtcaaggcttcagttttctcaggccggagcgagtgacattcgggaccagtctaggaactggcttcctggaccctgttaccgccagcagcgagtatcaaagacatctgcggataacaacaacagtgaatactcgtggactggagctaccaagcaccacctcaatggcagagactctctggtgaatccgggcccggccatggcaagccacaaggacgatgaagaaaagttttttcctcagagcggggttctcatctttgggaagcaaggctcagagaaaacaaatgtggacattgaaaaggtcatgattacagacgaagaggaaatcaggacaaccaatcccgtggctacggagcagtatggttctgtatctaccaacctccagagaggcaacagacaagcagctaccgcagatgtcaacacacaaggcgttcttccaggcatggtctggcaggacagagatgtgtaccttcaggggcccatctgggcaaagattccacacacggacggacattttcacccctctcccctcatgggtggattcggacttaaacaccctcctccacagattctcatcaagaacaccccggtacctgcgaatccttcgaccaccttcagtgcggcaaagtttgcttccttcatcacacagtactccacgggacaggtcagcgtggagatcgagtgggagctgcagaaggaaaacagcaaacgctggaatcccgaaattcagtacacttccaactacaacaagtctgttaatgtggactttactgtggacactaatggcgtgtattcagagcctcgccccattggcaccagatacctgactcgtaatctgtaa

SEQ ID NO: 4308 - DNA, 2208 bp, Artificial Sequence
  Description of Artificial Sequence: Synthetic polynucleotide
atggctgccgatggttatcttccagattggctcgaggacactctctctgaaggaataagacagtggtggaagctcaaacctggcccaccaccaccaaagcccgcagagcggcataaggacgacagcaggggtcttgtgcttcctgggtacaagtacctcggacccttcaacggactcgacaagggagagccggtcaacgaggcagacgccgcggccctcgagcacgacaaagcctacgaccggcagctcgacagcggagacaacccgtacctcaagtacaaccacgccgacgcggagtttcaggagcgccttaaagaagatacgtcttttgggggcaacctcggacgagcagtcttccaggcgaaaaagagggttcttgaacctctgggcctggttgaggaacctgttaagacggctccgggaaaaaagaggccggtagagcactctcctgtggagccagactcctcctcgggaaccggaaaggcgggccagcagcctgcaagaaaaagattgaattttggtcagactggagacgcagactcagtacctgacccccagcctctcggacagccaccagcagccccctctggtctgggaactaatacgatggctacaggcagtggcgcaccaatggcagacaataacgagggcgccgacggagtgggtaattcctcgggaaattggcattgcgattccacatggatgggcgacagagtcatcaccaccagcacccgaacctgggccctgcccacctacaacaaccacctctacaaacaaatttccagccaatcaggagcctcgaacgacaatcactactttggctacagcaccccttgggggtattttgacttcaacagattccactgccacttttcaccacgtgactggcaaagactcatcaacaacaactggggattccgacccaagagactcaacttcaagctctttaacattcaagtcaaagaggtcacgcagaatgacggtacgacgacgattgccaataaccttaccggcacggttcaggtgtttactgactcggagtaccagctcccgtacgtcctcggctcggcgcatcaaggatgcctcccgccgttcccagcagacgtcttcatggtgccacagtatggatacctcaccctgaacaacgggagtcaggcagtaggacgctcttcattttactgcctggagtactttccttctcagatgctgcgtaccggaaacaactttaccttcagctacacttttgaggacgttcctttccacagcagctacgctcacagccagagtctggaccgtctcatgaatcctctcatcgaccagtacctgtattacttgagcagaacaaacactccaagtggaaccaccacgcagtcaaggcttcagttttctcaggccggagcgagtgacattcgggaccagtctaggaactggcttcctggaccctgttaccgccagcagcgagtatcaaagacatctgcggataacaacaacagtgaatactcgtggactggagctaccaagtaccacctcaatggcagagactctctggtgaatccgggcccggccatggcaagccacaaggacgatgaagaaaagttttttcctcagagcggggttctcatctttgggaagcaaggctcagagaaaacaaatgtggacattgaaaaggtcatgattacagacgaagaggaaatcaggacaaccaatcccgtggctacggagcagtatggttctgtatctaccaacctccagagaggcaacagacaagcagctaccgcagatgtcaacacacaaggcgttcttccaggcatggtctggcaggacagagatgtgtaccttcaggggcccatctgggcaaagattccacacacggacggacattttcacccctctcccctcatgggtggattcggacttaaacaccctcctccacagattctcatcaagaacaccccggtacctgcgaatccttcgaccaccttcagtgcggcaaagtttgcttccttcatcacacagtactccacgggacaggtcagcgtggagatcgagtgggagctgcagaaggaaaacagcaaacgctggaatcccgaaattcagtacacttccaactacaacaagtctgttaatgtggactttactgtggacactaatggcgtgtattcagagcctcgccccattggcaccagatacctgactcgtaatctgtaa

SEQ ID NO: 4309 - DNA, 2208 bp, Artificial Sequence
  Description of Artificial Sequence: Synthetic polynucleotide
atggctgccgatggttatcttccagattggctcgaggacactctctctgaaggaataagacagtggtggaagctcaaacctggcccaccaccaccaaagcccgcagagcggcataaggacgacagcaggggtcttgtgcttcctgggtacaagtacctcggacccttcaacggactcgacaagggagagccggtcaacgaggcagacgccgcggccctcgagcacgacaaagcctacgaccggcagctcgacagcggagacaacccgtacctcaagtacaaccacgccgacgcggagtttcaggagcgccttaaagaagatacgtcttttgggggcaacctcggacgagcagtcttccgggcgaaaaagagggttcttgaacctctgggcctggttgaggaacctgttaagacggctccgggaaaaaagaggccggtagagcactctcctgtggagccagactcctcctcgggaaccggaaaggcgggccagcagcctgcaagaaaaagattgaattttggtcagactggagacgcagactcagtacctgacccccagcctctcggacagccaccagcagccccctctggtctgggaactaatacgatggctacaggcagtggcgcaccaatggcagacaataacgagggcgccgacggagtgggtaattcctcgggaaattggcattgcgattccacatggatgggcgacagagtcatcaccaccagcacccgaacctgggccctgcccacctacaacaaccacctctacaaacaaatttccagccaatcaggagcctcgaacgacaatcactactttggctacagcaccccttgggggtattttgacttcaacagattccactgccacttttcaccacgtgactggcaaagactcatcaacaacaactggggattccgacccaagagactcaacttcaagctctttaacattcaagtcaaagaggtcacgcagaatgacggtacgacgacgattgccaataaccttaccagcacggttcaggtgtttactgactcggagtaccagctcccgtacgtcctcggctcggcgcatcaaggatgcctcccgccgttcccagcagacgtcttcatggtgccacagtatggatacctcaccctgaacaacgggagtcaggcagtaggacgctcttcattttactgcctggagtactttccttctcagatgctgcgtaccggaaacaactttaccttcagctacacttttgaggacgttcctttccacagcagctacgctcacagccagagtctggaccgtctcatgaatcctctcatcgaccagtacctgtattacttgagcagaacaaacactccaagtggaaccaccacgcagtcaaggcttcagttttctcaggccggagcgagtgacattcgggaccagtctaggaactggcttcctggaccctgttaccgccagcagcgagtatcaaagacatctgcggataacaacaacagtgaatactcgtggactggagctaccaagtaccacctcaatggcagagactctctggtgaatccgggcccggccatggcaagccacaaggacgatgaagaaaagttttttcctcagagcggggttctcatctttgggaagcaaggctcagagaaaacaaatgtggacattgaaaaggtcatgattacagacgaagaggaaatcaggacaaccaatcccgtggctacggagcagtatggttctgtatctaccaacctccagagaggcaacagacaagcagctaccgcagatgtcaacacacaaggcgttcttccaggcatggtctggcaggacagagatgtgtaccttcaggggcccatctgggcaaagattccacacacggacggacattttcacccctctcccctcatgggtggattcggacttaaacaccctcctccacagattctcatcaagaacaccccggtacctgcgaatccttcgaccaccttcagtgcggcaaagtttgcttccttcatcacacagtactccacgggacaggtcagcgtggagatcgagtgggagctgcagaaggaaaacagcaaacgctggaatcccgaaattcagtacacttccaactacaacaagtctgttaatgtggactttactgtggacactaatggcgtgtattcagagcctcgccccattggcaccagatacctgactcgtaatctgtaa

SEQ ID NO: 4310 - DNA, 2208 bp, Artificial Sequence
  Description of Artificial Sequence: Synthetic polynucleotide
atggctgccgatggttatcttccagattggctcgaggacactctctctgaaggaataagacagtggtggaagctcaaacctggcccaccaccaccaaagcccgcagagcggcataaggacgacagcaggggtcttgtgcttcctgggtacaagtacctcggacccttcaacggactcgacaagggagagccggtcaacgaggcagacgccgcggccctcgagcacgacaaagcctacgaccggcagctcgacagcggagacaacccgtacctcaagtacaaccacgccgacgcggagtttcaggagcgccttaaagaagatacgtcttttgggggcaacctcggacgagcagtcttccaggcgaaaaagagggttcttgaacctctgggcctggttgaggaacctgttaagacggctccgggaaaaaagaggccggtagagcactctcctgtggagccagactcctcctcgggaaccggaaaggcgggccagcagcctgcaagaaaaagattgaattttggtcagactggagacgcagactcagtacctgacccccagcctctcggacagccaccagcagccccctctggtctgggaactaatacgatggctacaggcagtggcgcaccaatggcagacaataacgagggcgccgacggagtgggtaattcctcgggaaattggcattgcgattccacatggatgggcgacagagtcatcaccaccagcacccgaacctgggccctgcccacctacaacaaccacctctacaaacaaatttccagccaatcaggagcctcgaacgacaatcactactttggctacagcaccccttgggggtattttgacttcaacagattccactgccacttttcaccacgtgactggcaaagactcatcaacaacaactggggattccgacccaagagactcaacttcaagctctttaacattcaagtcaaagaggtcacgcagaatgacggtacgacgacgattgccaataaccttaccagcacggttcaggtgtttactgactcggagtaccagctcccgtacgtcctcggctcggcgcatcaaggatgcctcccgccgttcccagcagacgtcttcatggtgccacagtatggatacctcaccctgaacaacgggagtcaggcagtaggacgctcttcattttactgcctggagtactttccttctcagatgctgcgtaccggaaacaactttaccttcagctacacttttgaggacgttcctttccacagcagctacgctcacagccagagtctggaccgtctcatgaatcctctcatcgaccagtacctgtattacttgagcagaacaaacactccaagtggaaccaccacgcagtcaaggcttcagttttctcaggccggagcgagtgacattcgggaccagtctaggaactggcttcctggaccctgttaccgccagcagcgagtatcaaagacatctgcggataacaacaacagtgaatactcgtggactggagctaccaagtaccacctcaatggcagagactctctggtgaatccgggcccggccatggcaagccacaaggacgatgaagaaaagttttttcctcagagcggggttctcatctttgggaagcaaggctcagagaaaacaaatgtggacattgaaaaggtcatgattacagacgaagaggaaatcaggacaaccaatcccgtggctacggagcagtatggttctgtatctaccaacctccagagaggcaacagacaagcagctaccgcagatgtcaacacacaaggcgttcttccaggcacggtctggcaggacagagatgtgtaccttcaggggcccatctgggcaaagattccacacacggacggacattttcacccctctcccctcatgggtggattcggacttaaacaccctcctccacagattctcatcaagaacaccccggtacctgcgaatccttcgaccaccttcagtgcggcaaagtttgcttccttcatcacacagtactccacgggacaggccagcgtggagatcgagtgggagctgcagaaggaaaacagcaaacgctggaatcccgaaattcagtacacttccaactacaacaagtctgttaatgtggactttactgtggacactaatggcgtgtattcagagcctcgccccattggcaccagatacctgactcgtaatctgtaa

SEQ ID NO: 4311 - DNA, 2208 bp, Artificial Sequence
  Description of Artificial Sequence: Synthetic polynucleotide
atggctgccgatggttatcttccagattggctcgaggacactctctctgaaggaataagacagtggtggaagctcaaacctggcccaccaccgccaaagcccgcagagcggcacaaggacgccagtaggggtcttgtgcttcctgggtacaagtacctcggacccttcaacggactcgacaaaggagagccggtcaacgaggcagacgccgcggccctcgagcacgacaaggcctacgaccggcagctcgacagcggagacaacccgtacctcaagtacaaccacgccgacgcggagtttcaggagcgtcttaaagaagatacgtcttttgggggcaacctcggacgagcagtattccaggcgaaaaagagggttcttgaacctctgggcctggttgaggagcctgttaagacggctccgggaaaaaagaggccggtagagcactctcctgtggagccagactcctcctcgggaaccggaaaagcgggccagcagcctgcaagaaaaagattgaattttggtcagactggagacgcagactccgtacctgacccccagcctctcggacagccaccagcagcccccacaagtttgggatctactacaatggctacaggcagtggcgcaccaatggcagacaataacgagggtgccgatggagtgggtaattcctcaggaaattggcattgcgattcccaatggctgggcgacagagtcatcaccaccagcacccgaacctgggccctgcccacctacaacaaccacctctacaagcaaatctccagccaatcaggagcatcgaacgacaaccactactttggctacagcaccccttgggggtattttgacttcaacagattccactgtcacttctccccacgtgactggcaaagactcatcaacaacaactggggattccgacccaagagactcaacttcaagctctttaacattcaagtcaaagaggtcacgcagaatgacggtacgacgacgattgccaataaccttaccagcacggttcaggtgtttactgactcggagtaccagctcccgtacgtcctcggctcggcgcatcaaggatgcctcccgccgttcccagcagacgtcttcatggtcccacagtatggatacctcaccctgaacaacgggagtcaggcggtaggacgctcttccttttactgcctggagtactttccttctcagatgctgcgtaccggaaacaactttaccttcagctacacttttgaggacgttcctttccacagcagctacgctcacagccagagtctggaccgtctcatgaatcctctcatcgaccagtacctgtattacttgagcagaacaaacactccaagtggaaccaccacgcagtcaaggcttcagttttctcaggccggagcgagtgacattcgggaccagtctaggaactggcttcctggaccctgttaccgccagcagcgagtatcaaagacatctgcggataacaacaacagtgaatactcgtggactggagctaccaagtaccacctcaatggcagagactctctggtgaatccgggcccggccatggcaagccacaaggacgatgaagaaaagttttttcctcagagcggggttctcatctttgggaagcaaggctcagagaaaacaaatgtggacattgaaaaggtcatgattacagacgaagaggaaatcaggacaaccaatcccgtggctacggagcagtatggttctgtatctaccaacctccagagaggcaacagacaagcagctaccgcagatgtcaacacacaaggcgttcttccaggcatggtctggcaggacagagatgtgtaccttcaggggcccatctgggcaaagattccacacacggacggacattttcacccctctcccctcatgggtggattcggacttaaacaccctcctccacagattctcatcaagaacaccccggtacctgcgaatccttcgaccaccttcagtgcggcaaagtttgcttccttcatcacacagtactccacgggacaggtcagcgtggagatcgagtgggagctgcagaaggaaaacagcaaacgctggaatcccgaaattcagtacacttccaactacaacaagtctgttaatgtggactttactgtggacactaatggcgtgtattcagagcctcgccccattggcaccagatacctgactcgtaatctgtaa

SEQ ID NO: 4312 - DNA, 2208 bp, Artificial Sequence
  Description of Artificial Sequence: Synthetic polynucleotide
atggctgccgatggttatcttccagattggctcgaggacactctctctgaaggaataagacagtggtggaagctcaaacctggcccaccaccaccaaagcccgcagagcggcataaggacgacagcaggggtcttgtgcttcctgggtacaagtacctcggacccttcaacggactcgacaagggagagccggtcaacgaggcagacgccgcggccctcgagcacgacaaagcctacgaccggcagctcgacagcggagacaacccgtacctcaagtacaaccacgccgacgcggagtttcaggagcgccttaaagaagatacgtcttttgggggcaacctcggacgagcagtcttccaggcgaaaaagagggttcttgaacctctgggcctggttgaggaacctgttaagacggctccgggaaaaaagaggccggtagagcactctcctgtggagccagactcctcctcgggaaccggaaaggcgggccagcagcctgcaagaaaaagattgaattttggtcagactggagacgcagactcagtacctgacccccagcctctcggacagccaccagcagccccctctggtctgggaactaatacgatggctacaggcagtggcgcaccaatggcagacaataacgagggcgccgacggagtgggtaattcctcgggaaattggcattgcgattccacatggatgggcgacagagtcatcaccaccagcacccgaacctgggccctgcccacctacaacaaccacctctacaaacaaatttccagccaatcaggagccccgaacgacaatcactactttggctacagcaccccttgggggtattttgacttcaacagattccactgccacttttcaccacgtgactggcaaagactcatcaacaacaactggggattccgacccaagagactcaacttcaagctctttaacattcaagtcaaagaggtcacgcagaatgacggtacgacgacgattgccaataaccttaccagcacggttcaggtgtttactgactcggagtaccagctcccgtacgtcctcggctcggcgcatcaaggatgcctcccgccgttcccagcagacgtcttcatggtgccacagtatggatacctcaccctgaacaacgggagtcaggcagtaggacgctcttcattttactgcctggagtactttccttctcagatgctgcgtaccggaaacaactttaccttcagctacacttttgaggacgttcctttccacagcagctacgctcacagccagagtctggaccgtctcatgaatcctctcatcgaccagtacctgtattacttgagcagaacaaacactccaagtggaaccaccacgcagtcaaggcttcagttttctcaggccggagcgagtgacattcgggaccagtctaggaactggcttcctggaccctgttaccgccagcagcgagtatcaaagacatctgcggataacaacaacagtgaatactcgtggactggagctaccaagtaccacctcaatggcagagactctctggtgaatccgggcccggccatggcaagccacaaggacgatgaagaaaagttttttcctcagagcggggttctcatctttgggaagcaaggctcagagaaaacaaatgtggacattgaaaaggtcatgattacagacgaagaggaaatcaggacaaccaatcccgtggctacggagcagtatggttctgtatctaccaacctccagagaggcaacagacaagcagctaccgcagatgtcaacacacaaggcgttcttccaggcatggtctggcaggacagagatgtgtaccttcaggggcccatctgggcaaagattccacacacggacggacattttcacccctctcccctcatgggtggattcggacttaaacaccctcctccacagattctcatcaagaacaccccggtacctgcgaatccttcgaccaccttcagtgcggcaaagtttgcttccttcatcacacagtactccacgggacaggccagcgtggagatcgagtgggagctgcagaaggaaaacagcaaacgctggaatcccgaaattcagtacacttccaactacaacaagtctgttaatgtggactttactgtggacactaatggcgtgtattcagagcctcgccccattggcaccagatacctgactcgtaatctgtaa

SEQ ID NO: 4313 - DNA, 2208 bp, Artificial Sequence
  Description of Artificial Sequence: Synthetic polynucleotide
atggctgccgatggttatcttccagattggctcgaggacactctctctgaaggaataagacagtggtggaagctcaaacctggcccaccaccaccaaagcccgcagagcggcataaggacgacagcaggggtcttgtgcttcctgggtacaagtacctcggacccttcaacggactcgacaaaggagagccggtcaacgaggcagacgccgcggccctcgagcacgacaaggcctacgaccggcagctcgacagcggagacaacccgtacctcaagtacaaccacgccgacgcggagtttcaggagcgtcttaaagaagatacgtcttttgggggcaacctcggacgagcagtattccaggcgaaaaagagggttcttgaacctctgggcctggttgaggagcctgttaagacggctccgggaaaaaagaggccggtagagcactctcctgtggagccagactcctcctcgggaaccggaaaagcgggccagcagcctgcaagaaaaagattgaattttggtcagactggagacgcagactccgtacctgacccccagcctctcggacagccaccagcagcccccacaagtttgggatctactacaatggctacaggcagtggcgcaccaatggcagacaataacgagggtgccgatggagtgggtaattcctcaggaaattggcattgcgattcccaatggctgggcgacagagtcatcaccaccagcacccgaacctgggccctgcccacctacaacaaccacctctacaaacaaatttccagccaatcaggagcctcgaacgacaatcactactttggctacagcaccccttgggggtattttgacttcaacagattccactgccacttttcaccacgtgactggcaaagactcatcaacaacaactggggattccgacccaagagactcaacttcaagctctttaacattcaagtcaaagaggtcacgcagaatgacggtacgacgacgattgccaataaccttaccagcacggttcaggtgtttactgactcggagtaccagctcccgtacgtcctcggctcggcgcatcaaggatgcctcccgccgttcccagcagacgtcttcatggtgccacagtatggatacctcaccctgaacaacgggagtcaggcagtaggacgctcttcattttactgcctggagtactttccttctcagatgctgcgtaccggaaacaactttaccttcagctacacttttgaggacgttcctttccacagcagctacgctcacagccagagtctggaccgtctcatgaatcctctcatcgaccagtacctgtattacttgagcagaacaaacactccaagtggaaccaccacgcagtcaaggcttcagttttctcaggccggagcgagtgacattcgggaccagtctaggaactggcttcctggaccctgttaccgccagcagcgagtatcaaagacatctgcggataacaacaacagtgaatactcgtggactggagctaccaagtaccacctcaatggcagagactctctggtgaatccgggcccggccatggcaagccacaaggacgatgaagaaaagttttttcctcagagcggggttctcatctttgggaagcaaggctcagagaaaacaaatgtggacattgaaaaggtcatgattacagacgaagaggaaatcaggacaaccaatcccgtggctacggagcagtatggttctgtatctaccaacctccagagaggcaacagacaagcagctaccgcagatgtcaacacacaaggcgttcttccaggcatggtctggcaggacagagatgtgtaccttcaggggcccatctgggcaaagattccacacacggacggacattttcacccctctcccctcatgggtggattcggacttaaacaccctcctccacagattctcatcaagaacaccccggtacctgcgaatccttcgaccaccttcagtgcggcaaagtttgcttccttcatcacacagtactccacgggacaggtcagcgtggagatcgagtgggagctgcagaaggaaaacagcaaacgctggaatcccgaaattcagtacacttccaactacaacaagtctgttaatgtggactttactgtggacactaatggcgtgtattcagagcctcgccccattggcaccagatacctgactcgtaatctgtaa

SEQ ID NO: 4314 - DNA, 2208 bp, Artificial Sequence
  Description of Artificial Sequence: Synthetic polynucleotide
atggctgccgatggttatcttccagattggctcgaggacattctctctgaaggaataagacagtggtggaagctcaaacctggcccaccaccgccaaagcccgcagagcggcacaaggacgccagtaggggtcttgtgcttcctgggtacaagtacctcggacccttcaacggactcgacaaaggagagccggtcaacgaggcagacgccgcggccctcgagcacgacaaggcctacgaccggcagctcgacagcggagacaacccgtacctcaagtacaaccacgccgacgcggagtttcaggagcgtcttaaagaagatacgtcttttgggggcaacctcggacgagcagtattccaggcgaaaaagagggttcttgaacctctgggcctggttgaggagcctgttaagacggctccgggaaaaaagaggccggtagagcactctcctgtggagccagactcctcctcgggaaccggaaaagcgggccagcagcctgcaagaaaaagattgaattttggtcagactggagacgcagactccgtacctgacccccagcctctcggacagccaccagcagcccccacaagtttgggatctactacaatggctacaggcagtggcgcaccaatggcagacaataacgagggtgccgatggagtgggtaattcctcaggaaattggcattgcgattcccaatggctgggcgacagagtcatcaccaccagcacccgaacctgggccctgcccacctacaacaaccacctctacaagcaaatctccagccaatcaggagcatcgaacgacaaccactactttggctacagcaccccttgggggtattttgacttcaacagattccactgtcacttctccccacgtgactggcaaagactcatcaacaacaactggggattccgacccaagagactcaacttcaagctctttaacattcaagtcaaagaggtcacgcagaatgacggtacgacgacgattgccaataaccttaccagcacggttcaggtgtttactgactcggagtaccagctcccgtacgtcctcggctcggcgcatcaaggatgcctcccgccgttcccagcagacgtcttcatggtgccacagtatggatacctcaccctgaacaacgggagtcaggcagtaggacgctcttcattttactgcctggagtactttccttctcagatgctgcgtaccggaaacaactttaccttcagctacacttttgaggacgttcctttccacagcagctacgctcacagccagagtctggaccgtctcatgaatcctctcatcgaccagtacctgtattacttgagcagaacaaacactccaagtggaaccaccacgcagtcaaggcttcagttttctcaggccggagcgagtgacattcgggaccagtctaggaactggcttcctggaccctgttaccgccagcagcgagtatcaaagacatctgcggataacaacaacagtgaatactcgtggactggagctaccaagtaccacctcaatggcagagactctctggtgaatccgggcccggccatggcaagccacaaggacgatgaagaaaagttttttcctcagagcggggttctcatctttgggaagcaaggctcagagaaaacaaatgtggacattgaaaaggtcatgattacagacgaagaggaaatcaggacaaccaatcccgtggctacggagcagtatggttctgtatctaccaacctccagagaggcaacagacaagcagctaccgcagatgtcaacacacaaggcgttcttccaggcatggtctggcaggacagagatgtgtaccttcaggggcccatctgggcaaagattccacacacggacggacattttcacccctctcccctcatgggtggattcggacttaaacaccctcctccacagattctcatcaagaacaccccggtacctgcgaatccttcgaccaccttcagtgcggcaaagtttgcttccttcatcacacagtactccacgggacaggtcagcgtggagatcgagtgggagctgcagaaggaaaacagcaaacgctggaatcccgaaattcagtacacttccaactacaacaagtctgttaatgtggactttactgtggacactaatggcgtgtattcagagcctcgccccattggcaccagatacctgactcgtaatctgtaa

SEQ ID NO: 4315 - DNA, 2208 bp, Artificial Sequence
  Description of Artificial Sequence: Synthetic polynucleotide
atggctgccgatggttatcttccagattggctcgaggacactctctctgaaggaataagacagtggtggaagctcaaacctggcccaccaccgccaaagcccgcagagcggcacaaggacgccagtaggggtcttgtgcttcctgggtacaagtacctcggacccttcaacggactcgacaaaggagagccggtcaacgaggcagacgccgcggccctcgagcacgacaaggcctacgaccggcagctcgacagcggagacaacccgtacctcaagtacaaccacgccgacgcggagtttcaggagcgtcttaaagaagatacgtcttttgggggcaacctcggacgagcagtattccaggcgaaaaagagggttcttgaacctctgggcctggttgaggagcctgttaagacggctccgggaaaaaagaggccggtagagcactctcctgtggagccagactcctcctcgggaaccggaaaagcgggccagcagcctgcaagaaaaagattgaattttggtcagactggagacgcagactcagtacctgacccccagcctctcggacagccaccagcagccccctctggtctgggaactaatacgatggctacaggcagtggcgcaccaatggcagacaataacgagggcgccgacggagtgggtaattcctcgggaaattggcattgcgattccacatggatgggcgacagagtcatcaccaccagcacccgaacctgggccctgcccacctacaacaaccacctctacaaacaaatttccagccaatcaggagcctcgaacgacaatcactactttggctacagcaccccttgggggtattttgacttcaacagattccactgccacttttcaccacgtgactggcaaagactcatcaacaacaactggggattccgacccaagagactcaacttcaagctctttaacattcaagtcaaagaggtcacgcagaatgacggtacgacgacgattgccaataaccttaccagcacggttcaggtgtttactgactcggagtaccagctcccgtacgtcctcggctcggcgcatcaaggatgcctcccgccgttcccagcagacgtcttcatggtgccacagtatggatacctcaccctgaacaacgggagtcaggcagtaggacgctcttcattttactgcctggagtactttccttctcagatgctgcgtaccggaaacaactttaccttcagctacacttttgaggacgttcctttccacagcagctacgctcacagccagagtctggaccgtctcatgaatcctctcatcgaccagtacctgtattacttgagcagaacaaacactccaagtggaaccaccacgcagtcaaggcttcagttttctcaggccggagcgagtgacattcgggaccagtctaggaactggcttcctggaccctgttaccgccagcagcgagtatcaaagacatctgcggataacaacaacagtgaatactcgtggactggagctaccaagtaccacctcaatggcagagactctctggtgaatccgggcccggccatggcaagccacaaggacgatgaagaaaagttttttcctcagagcggggttctcatctttgggaagcaaggctcagagaaaacaaatgtggacattgaaaaggtcatgattacagacgaagaggaaatcaggacaaccaatcccgtggctacggagcagtatggttctgtatctaccaacctccagagaggcaacagacaagcagctaccgcagatgtcaacacacaaggcgttcttccaggcatggtctggcaggacagagatgtgtaccttcaggggcccatctgggcaaagattccacacacggacggacattttcacccctctcccctcatgggtggattcggacttaaacaccctcctccacagattctcatcaagaacaccccggtacctgcgaatccttcgaccaccttcagtgcggcaaagtttgcttccttcatcacacagtactccacgggacaggccagcgtggagatcgagtgggagctgcagaaggaaaacagcaaacgctggaatcccgaaattcagtacacttccaactacaacaagtctgttaatgtggactttactgtggacactaatggcgtgtattcagagcctcgccccattggcaccagatacctgactcgtaatctgtaa

SEQ ID NO: 4316 - DNA, 2208 bp, Artificial Sequence
  Description of Artificial Sequence: Synthetic polynucleotide
atggctgccgatggttatcttccagattggctcgaggacactctctctgaaggaataagacagtggtggaagctcaaacctggcccaccaccaccaaagcccgcagagcggcataaggacgacagcaggggtcttgtgcttcctgggtacaagtacctcggacccttcaacggactcgacaagggagagccggtcaacgaggcagacgccgcggccctcgagcacgacaaagcctacgaccggcagctcgacagcggagacaacccgtacctcaagtacaaccacgccgacgcggagtttcaggagcgccttaaagaagatacgtcttttgggggcaacctcggacgagcagtattccaggcgaaaaagagggttcttgaacctctgggcctggttgaggagcctgttaagacggctccgggaaaaaagaggccggtagagcactctcctgtggagccagactcctcctcgggaaccggaaaagcgggccagcagcctgcaagaaaaagattgaattttggtcagactggagacgcagactccgtacctgacccccagcctctcggacagccaccagcagcccccacaagtttgggatctactacaatggctacaggcagtggcgcaccaatggcagacaataacgagggtgccgatggagtgggtaattcctcrggaaattggcattgcgattccacatggatgggcgacagagtcatcaccaccagcacccgaacctgggccctgcccacctacaacaaccacctctacaaacaaatttccagccaatcaggagcctcgaacgacaatcactactttggctacagcaccccttgggggtattttgacttcaacagattccactgccacttttcaccacgtgactggcaaagactcatcaacaacaactggggattccgacccaagagactcaacttcaagctctttaacattcaagtcaaagaggtcacgcagaatgacggtacgacgacgattgccaataaccttaccagcacggttcaggtgtttactgactcggagtaccagctcccgtacgtcctcggctcggcgcatcaaggatgcctcccgccgttcccagcagacgtcttcatggtgccacagtatggatacctcaccctgaacaacgggagtcaggcagtaggacgctcttcattttactgcctggagtactttccttctcagatgctgcgtaccggaaacaactttaccttcagctacacttttgaggacgttcctttccacagcagctacgctcacagccagagtctggaccgtctcatgaatcctctcatcgaccagtacctgtattacttgagcagaacaaacactccaagtggaaccaccacgcagtcaaggcttcagttttctcaggccggagcgagtgacattcgggaccagtctaggaactggcttcctggaccctgttaccgccagcagcgagtatcaaagacatctgcggataacaacaacagtgaatactcgtggactggagctaccaagtaccacctcaatggcagagactctctggtgaatccgggcccggccatggcaagccacaaggacgatgaagaaaagttttttcctcagagcggggttctcatctttgggaagcaaggctcagagaaaacaaatgtggacattgaaaaggtcatgattacagacgaagaggaaatcaggacaaccaatcccgtggctacggagcagtatggttctgtatctaccaacctccagagaggcaacagacaagcagctaccgcagatgtcaacacacaaggcgttcttccaggcatggtctggcaggacagagatgtgtaccttcaggggcccatctgggcaaagattccacacacggacggacattttcacccctctcccctcatgggtggattcggacttaaacaccctcctccacagattctcatcaagaacaccccggtacctgcgaatccttcgaccaccttcagtgcggcaaagtttgcttccttcatcacacagtactccacgggacaggccagcgtggagatcgagtgggagctgcagaaggaaaacagcaaacgctggaatcccgaaattcagtacacttccaactacaacaagtctgttaatgtggactttactgtggacactaatggcgtgtattcagagcctcgccccattggcaccagatacctgactcgtaatctgtaa

SEQ ID NO: 4317 - DNA, 2208 bp, Artificial Sequence
  Description of Artificial Sequence: Synthetic polynucleotide
atggctgccgatggttatcttccagattggctcgaggacactctctctgaaggaataagacagtggtggaagctcaaacctggcccaccaccgccaaagcccgcagagcggcacaaggacgccagtaggggtcttgtgcttcctgggtacaagtacctcggacccttcaacggactcgacaaaggagagccggtcaacgaggcagacgccgcggccctcgagcacgacaaggcctacgaccggcagctcgacagcggagacaacccgtacctcaagtacaaccacgccgacgcggagtttcaggagcgtcttaaagaagatacgtcttttgggggcaacctcggacgagcagtattccaggcgaaaaagagggttcttgaacctctgggcctggttgaggaacctgttaagacggctccgggaaaaaagaggccggtagagcactctcctgtggagccagactcctcctcgggaaccggaaaggcgggccagcagcctgcaagaaaaagattgaattttggtcagactggagacgcagactcagtacctgacccccagcctctcggacagccaccagcagccccctctggtctgggaactaatacgatggctacaggcagtggcgcaccaatggcagacaataacgagggcgccgacggagtgggtaattcctcgggaaattggcattgcgattccacatggatgggcgacagagtcatcaccaccagcacccgaacctgggccctgcccacctacaacaaccacctctacaaacaaatttccagccaatcaggagcctcgaacgacaatcactactttggctacagcaccccttgggggtattttgacttcaacagattccactgccacttttcaccacgtgactggcaaagactcatcaacaacaactggggattccgacccaagagactcaacttcaagctctttaacattcaagtcaaagaggtcacgcagaatgacggtacgacgacgattgccaataaccttaccagcacggttcaggtgtttactgactcggagtaccagctcccgtacgtcctcggctcggcgcatcaaggatgcctcccgccgttcccagcagacgtcttcatggtgccacagtatggatacctcaccctgaacaacgggagtcaggcagtaggacgctcttcattttactgcctggagtactttccttctcagatgctgcgtaccggaaacaactttaccttcagctacacttttgaggacgttcctttccacagcagctacgctcacagccagagtctggaccgtctcatgaatcctctcatcgaccagtacctgtattacttgagcagaacaaacactccaagtggaaccaccacgcagtcaaggcttcagttttctcaggccggagcgagtgacattcgggaccagtctaggaactggcttcctggaccctgttaccgccagcagcgagtatcaaagacatctgcggataacaacaacagtgaatactcgtggactggagctaccaagtaccacctcaatggcagagactctctggtgaatccgggcccggccatggcaagccacaaggacgatgaagaaaagttttttcctcagagcggggttctcatctttgggaagcaaggctcagagaaaacaaatgtggacattgaaaaggtcatgattacagacgaagaggaaatcaggacaaccaatcccgtggctacggagcagtatggttctgtatctaccaacctccagagaggcaacaggcaagcagctaccgcagatgtcaacacacaaggcgttcttccaggcatggtctggcaggacagagatgtgtaccttcaggggcccatctgggcaaagattccacacacggacggacattttcacccctctcccctcatgggtggattcggacttaaacaccctcctccacagattctcatcaagaacaccccggtacctgcgaatccttcgaccaccttcagtgcggcaaagtttgcttccttcatcacacagtactccacgggacaggtcagcgtggagatcgagtgggagctgcagaaggaaaacagcaaacgctggaatcccgaaattcagtacacttccaactacaacaagtctgttaatgtggactttactgtggacactaatggcgtgtattcagagcctcgccccattggcaccagatacctgactcgtaatctgtaa

SEQ ID NO: 4318 - DNA, 2208 bp, Artificial Sequence
  Description of Artificial Sequence: Synthetic polynucleotide
atggctgccgatggttatcttccagattggctcgaggacactctctctgaaggaataagacagtggtggaagctcaaacctggcccaccaccgccaaagcccgcagagcggcacaaggacgccagtaggggtcttgtgcttcctgggtacaagtacctcggacccttcaacggactcgacaaaggagagccggtcaacgaggcagacgccgcggccctcgagcacgacaaggcctacgaccggcagctcgacagcggagacaacccgtacctcaagtacaaccacgccgacgcggagtttcaggagcgtcttaaagaagatacgccttttgggggcaacctcggacgagcagtattccaggcgaaaaagagggttcttgaacctctgggcctggttgaggagcctgttaagacggctccgggaaaaaagaggccggtagagcactctcctgtggagccagactcctcctcgggaaccggaaaagcgggccagcggcctgcaagaaaaagattgaattttggtcagactggagacgcagactccgtacctgacccccagcctctcggacagccaccagcagcccccacaagtttgggatctactacaatggctacaggcagtggcgcaccaatggcagacaataacgagggtgccgatggagtgggtaattcctcaggaaattggcattgcgattcccaatggctgggcgacagagtcatcaccaccagcacccgaacctgggccctgcccacctacaacaaccacctctacaagcaaatccccagccaatcaggagcatcgaacgacaaccactactttggctacagcaccccttgggggtattttgacttcaacagattccactgtcacttctccccacgtgactggcaaagactcatcaacaacaactggggattccgacccaagagactcaacttcaagctctttaacattcaagtcaaagaggtcacgcagaatgacggtacgacgacgattgccaataaccttaccagcacggttcaggtgtttactgactcggagtaccagctcccgtacgtcctcggctcggcgcatcaaggatgcctcccgccgttcccagcagacgtcttcatggtgccacagtatggatacctcaccctgaacaacgggagtcaggcagtaggacgctcttcattttactgcctggagtactttccttctcagatgctgcgtaccggaaacaactttaccttcagctacacttttgaggacgttcctttccacagcagctacgctcacagccagagtctggaccgtctcatgaatcctctcatcgaccagtacctgtattacttgagcagaacaaacactccaagtggaaccaccacgcagtcaaggcttcagttttctcaggccggagcgagtgacattcgggaccagtctaggaactggcttcctggaccctgttaccgccagcagcgagtatcaaagacatctgcggataacaacaacagtgaatactcgtggactggagctaccaagtaccacctcaatggcagagactctctggtgaatccgggcccggccatggcaagccacaaggacgatgaagaaaagttttttcctcagagcggggttctcatctttgggaagcaaggctcagagaaaacaaatgtggacattgaaaaggtcatgattacagacgaagaggaaatcaggacaaccaatcccgtggctacggagcagtatggttctgtatctaccaacctccagagaggcaacagacaagcagctaccgcagatgtcaacacacaaggcgttcttccaggcatggtctggcaggacagagatgtgtaccttcaggggcccatctgggcaaagattccacacacggacggacattttcacccctctcccctcatgggtggattcggacttaaacaccctcctccacagattctcatcaagaacaccccggtacctgcgaatccttcgaccaccttcagtgcggcaaagtttgcttccttcatcacacagtactccacgggacaggccagcgtggagatcgagtgggagctgcagaaggaaaacagcaaacgctggaatcccgaaattcagtacacttccaactacaacaagtctgttaatgtggactttactgtggacactaatggcgtgtattcagagcctcgccccattggcaccagatacctgactcgtaatctgtaa

SEQ ID NO: 4319 - DNA, 2208 bp, Artificial Sequence
  Description of Artificial Sequence: Synthetic polynucleotide
atggctgccgatggttatcttccagattggctcgaggacactctctctgaaggaataagacagtggtggaagctcaaacctggcccaccaccgccaaagcccgcagagcggcacaaggacgacagtaggggtcttgtgcttcctgggtacaagtacctcggacccttcaacggactcgacaaaggagagccggtcaacgaggcagacgccgcggccctcgagcacgacaaggcctacgaccggcagctcgacagcggagacaacccgtacctcaagtacaaccacgccgacgcggagtttcaggagcgtcttaaagaagatacgtcttttgggggcaacctcggacgagcagtattccaggcgaaaaagagggttcttgaacctctgggcctggttgaggagcctgttaagacggctccgggaaaaaagaggccggtagagcactctcctgtggagccagactcctcctcgggaaccggaaaagcgggccagcagcctgcaagaaaaagattgaattttggtcagactggagacgcagactccgtacctgacccccagcctctcggacagccaccagcagcccccacaagtttgggatctactacaatggctacaggcagtggcgcaccaatggcagacaataacgagggtgccgatggagtgggtaattcctcaggaaattggcattgcgattccacatggatgggcgacagagtcatcaccaccagcacccgaacctgggccctgcccacctacaacaaccacctctacaaacaaatttccagccaatcaggagcctcgaacgacaatcactactttggctacagcaccccttgggggtattttgacttcaacagattccactgccacttttcaccacgtgactggcaaagactcatcaacaacaactggggattccgacccaagagactcaacttcaagctctttaacattcaagtcaaagaggtcacgcagaatgacggtacgacgacgattgccaataaccttaccagcacggttcaggtgtttactgactcggagtaccagctcccgtacgtcctcggctcggcgcatcaaggatgcctcccgccgttcccagcagacgtcttcatggtgccacagtatggatacctcaccctgaacaacgggagtcaggcagtaggacgctcttcattttactgcctggagtactttccttctcagatgctgcgtaccggaaacaactttaccttcagctacacttttgaggacgttcctttccacagcagctacgctcacagccagagtctggaccgtctcatgaatcctctcaccgaccagtacctgtattacttgagcagaacaaacactccaagtggaaccaccacgcagtcaaggcttcagttttctcaggccggagcgagtgacattcgggaccagtctaggaactggcttcctggaccctgttaccgccagcagcgagtatcaaagacatctgcggataacaacaacagtgaatactcgtggactggagctaccaagtaccacctcaatggcagagactctctggtgaatccgggcccggccatggcaagccacaaggacgatgaagaaaagttttttcctcagagcggggttctcatctttgggaagcaaggctcagagaaaacaaatgtggacattgaaaaggtcatgattacagacgaagaggaaatcaggacaaccaatcccgtggctacggagcagtatggttctgtatctaccaacctccagagaggcaacagacaagcagctaccgcagatgtcaacacacaaggcgttcttccaggcatggtctggcaggacagagatgtgtaccttcaggggcccatctgggcaaagattccacacacggacggacattttcacccctctcccctcatgggtggattcggacttaaacaccctcctccacagattctcatcaagaacaccccggtacctgcgaatccttcgaccaccttcagtgcggcaaagtttgcttccttcatcacacagtactccacgggacaggtcagcgtggagatcgagtgggagctgcagaaggaaaacagcaaacgctggaatcccgaaattcagtacacttccaactacaacaagtctgttaatgtggactttactgtggacactaatggcgtgtattcagagcctcgccccattggcaccagatacctgactcgtaatctgtaa

SEQ ID NO: 4320 - DNA, 2208 bp, Artificial Sequence
  Description of Artificial Sequence: Synthetic polynucleotide
atggctgccgatggttatcttccagattggctcgaggacactctctctgaaggaataagacagtggtggaagctcaaacctggcccaccaccaccaaagcccgcagagcggcataaggacgacagcaggggtcttgtgcttcctgggtacaagtacctcggacccttcaacggactcgacaagggagagccggtcaacgaggcagacgccgcggccctcgagcacgacaaagcctacgaccggcagctcgacagcggagacaacccgtacctcaagtacaaccacgccgacgcggagtttcaggagcgccttaaagaagatacgtcttttgggggcaacctcggacgagcagtcttccaggcgaaaaagagggttcttgaacctctgggcctggttgaggaacctgttaagacggctccgggaaaaaagaggccggtagagcactctcctgtggagccagactcctcctcgggaaccggaaaggcgggccagcagcctgcaagaaaaagattgaattttggtcagactggagacgcagactcagtacctgacccccagcctctcggacagccaccagcagccccctctggtctgggaactaatacgatggctacaggcagtggcgcaccaatggcagacaataacgagggcgccgacggagtgggtaattcctcgggaaattggcattgcgattccacatggatgggcgacagagtcatcaccaccagcacccgaacctgggccctgcccacctacaacaaccacctctacaaacaaatttccagccaatcaggagcctcgaacgacaatcactactttggctacagcaccccttgggggtattttgacttcaacagattccactgccacttttcaccacgtgactggcaaagactcatcaacaacaactggggattccgacccaagagactcaacttcaagctctttaacattcaagtcaaagaggtcacgcagaatgacggtacgacgacgattgccaataaccttaccagcacggttcaggtgtttactgactcggagtaccagctcccgtacgtcctcggctcggcgcatcaaggatgcctcccgccgttcccagcagacgtcttcatggtgccacagtatggatacctcaccctgaacaacgggagtcaggcagtaggacgctcttcattttactgcctggagtactttccttctcagatgctgcgtaccggaaacaactttaccttcagctacacttttgaggacgttcctttccacagcagctacgctcacagccagagtctggaccgtctcatgaatcctctcatcgaccagtacctgtattacttgagcagaacaaacactccaagtggaaccaccgcgcagtcaaggcttcagttttctcaggccggagcgagtgacattcgggaccagtctaggaactggcttcctggaccctgttaccgccagcagcgagtatcaaagacatctgcggataacaacaacagtgaatactcgtggactggagctaccaagtaccacctcaatggcagagactctctggtgaatccgggcccggccatggcaagccacaaggacgatgaagaaaagttttttcctcagagcggggttctcatctttgggaagcaaggctcagagaaaacaaatgtggacattgaaaaggtcatgattacagacgaagaggaaatcaggacaaccaatcccgtggctacggagcagtatggttctgtatctaccaacctccagagaggcaacagacaagcagctaccgcagatgtcaacacacaaggcgttcttccaggcatggtctggcaggacagagatgtgtaccttcaggggcccatctgggcaaagattccacacacggacggacattttcacccctctcccctcatgggtggattcggacttaaacaccctcctccacagattctcatcaagaacaccccggtacctgcgaatccttcgaccaccttcagtgcggcaaagtttgcttccttcatcacacagtactccacgggacaggtcagcgtggagatcgagtgggagctgcagaaggaaaacagcaaacgctggaatcccgaaattcagtacacttccaactacaacaagtctgttaatgtggactttactgtggacactaatggcgtgtattcagagcctcgccccattggcaccagatacctgactcgtaatctgtaa

SEQ ID NO: 4321 - DNA, 2208 bp, Artificial Sequence
  Description of Artificial Sequence: Synthetic polynucleotide
atggctgccgatggttatcttccagattggctcgaggacactctctctgaaggaataagacagtggtggaagctcaaacctggcccaccaccaccaaagcccgcagagcggcataaggacgacagcaggggtcttgtgcttcctgggtacaagtacctcggacccttcaacggactcgacaagggagagccggtcaacgaggcagacgccgcggccctcgagcacgacaaagcctacgaccggcagctcgacagcggagacaacccgtacctcaagtacaaccacgccgacgcggagtttcaggagcgccttaaagaagatacgtcttttgggggcaacctcggacgagcagtcttccaggcgaaaaagagggttcttgaacctctgggcctggttgaggaacctgttaagacggctccgggaaaaaagaggccggtagagcactctcctgtggagccagactcctcctcgggaaccggaaaggcgggccagcagcctgcaagaaaaagattgaattttggtcagactggagacgcagactcagtacctgacccccagcctctcggacagccaccagcagccccctctggtctgggaactaatacgatggctacaggcagtggcgcaccaatggcagacaataacgagggcgccgacggagtgggtaattcctcgggaaattggcattgcgattccacatggatgggcgacagagtcatcaccaccagcacccgaacctgggccctgcccacctacaacaaccacctctacaaacaaatttccagccaatcaggagcctcgaacggcaatcactactttggctacagcaccccttgggggtattttgacttcaacagattccactgccacttttcaccacgtgactggcaaagactcatcaacaacaactggggattccgacccaagagactcaacttcaagctctttaacattcaagtcaaagaggtcacgcagaatgacggtacgacgacgattgccaataaccttaccagcacggttcaggtgtttactgactcggagtaccagctcccgtacgtcctcggctcggcgcatcaaggatgcctcccgccgttcccagcagacgtcttcatggtgccacagtatggatacctcaccctgaacaacgggagtcaggcagtaggacgctcttcattttactgcctggagtactttccttctcagatgctgcgtaccggaaacaactttaccttcagctacacttttgaggacgttcctttccacagcagctacgctcacagccagagtctggaccgtctcatgaatcctctcatcgaccagtacctgtattacttgagcagaacaaacactccaagtggaaccaccacgcagtcaaggcttcagttttctcaggccggagcgagtgacattcgggaccagtctaggaactggcttcctggaccctgttaccgccagcagcgagtatcaaagacatctgcggataacaacaacagtgaatactcgtggactggagctaccaagtaccacctcaatggcagagactctctggtgaatccgggcccggccatggcaagccacaaggacgatgaagaaaagttttttcctcagagcggggttctcatctttgggaagcaaggctcagagaaaacaaatgtggacattgaaaaggtcatgattacagacgaagaggaaatcaggacaaccaatcccgtggctacggagcagtatggttctgtatctaccaacctccagagaggcaacagacaagcagctaccgcagatgtcaacacacaaggcgttcttccaggcatggtctggcaggacagagatgtgtaccttcaggggcccatctgggcaaagattccacacacggacggacattttcacccctctcccctcatgggtggattcggacttaaacaccctcctccacagattctcatcaagaacaccccggtacctgcgaatccttcgaccaccttcagtgcggcaaagtttgcttccttcatcacacagtactccacgggacaggtcagcgtggagatcgagtgggagctgcagaaggaaaacagcaaacgctggaatcccgaaattcagtacacttccaactacaacaagtctgttaatgtggactttactgtggacactaatggcgtgtattcagagcctcgccccattggcaccagatacctgactcgtaatctgtaa

SEQ ID NO: 4322 - DNA, 2208 bp, Artificial Sequence
  Description of Artificial Sequence: Synthetic polynucleotide
atggctgccgatggttatcttccagattggctcgaggacactctctctgaaggaataagacagtggtggaagctcaaacctggcccaccaccaccaaagcccgcagagcggcataaggacgacagcaggggtcttgtgcttcctgggtacaagtacctcggacccttcaacggactcgacaagggagagccggtcaacgaggcagacgccgcggccctcgagcacgacaaagcctacgaccggcagctcgacagcggagacaacccgtacctcaagtacaaccacgccgacgcggagtttcaggagcgccttaaagaagatacgtcttttgggggcaacctcggacgagcagtcttccaggcgaaaaagagggttcttgaacctctgggcctggttgaggaacctgttaagacggctccgggaaaaaagaggccggtagagcactctcctgtggagccagactcctcctcgggaaccggaaaggcgggccagcagcctgcaagaaaaagattgaattttggtcagactggagacgcagactcagtacctgacccccagcctctcggacagccaccagcagccccctctggtctgggaactaatacgatggctacaggcagtggcgcaccaatggcagacaataacgagggcgccgacggagtgggtaattcctcgggaaattggcattgcgattccacatggatgggcgacagagtcatcaccaccagcacccgaacctgggccctgcccacctacaacaaccacctctacaaacaaatttccagccaatcaggagcctcgaacgacaatcactactttggctacagcaccccttgggggtattttgacttcaacagattccactgccacttttcaccacgtgactggcaaagactcatcaacaacaactggggattccgacccaagagactcaacttcaagctctttaacattcaagtcaaagaggtcacgcagaatgacggtacgacgacgattgccaataaccttaccagcacggttcaggtgtttactgactcggagtaccagctcccgtacgtcctcggctcggcgcatcaaggatgcctcccgccgttcccagcagacgtcttcatggtgccacagtatggatacctcaccctgaacaacgggagtcaggcagtaggacgctcttcattttactgcctggagtactttccttctcagatgctgcgtaccggaaacaactttaccttcagctacacttttgaggacgttcctttccacagcagctacgctcacagccagagtctggaccgtctcatgaatcctctcatcgaccagtacctgtattacttgagcagaacaaacactccaagtggaaccaccacgcagtcaaggcttcagttttctcaggccggagcgagtgacattcgggaccagtctaggaactggcttcctggaccctgttaccgccagcagcgagtatcaaagacatctgcggataacaacaacagtgaatactcgtggactggagctaccaagtaccacctcaatggcagagactctctggtgaatccgggcccggccatggcaagccacaaggacgatgaagaaaagttttttcctcagagcggggttctcatctttgggaagcaaggctcagagaaaacaaatgtggacattgaaagggtcatgattacagacgaagaggaaatcaggacaaccaatcccgtggctacggagcagtatggttctgtatctaccaacctccagagaggcaacagacaagcagctaccgcagatgtcaacacacaaggcgttcttccaggcatggtctggcaggacagagatgtgtaccttcaggggcccatctgggcaaagattccacacacggacggacattttcacccctctcccctcatgggtggattcggacttaaacaccctcctccacagattctcatcaagaacaccccggtacctgcgaatccttcgaccaccttcagtgcggcaaagtttgcttccttcatcacacagtactccacgggacaggtcagcgtggagatcgagtgggagctgcagaaggaaaacagcaaacgctggaatcccgaaattcagtacacttccaactacaacaagtctgttaatgtggactttactgtggacactaatggcgtgtattcagagcctcgccccattggcaccagatacctgactcgtaatctgtaa

SEQ ID NO: 4323 - DNA, 2208 bp, Artificial Sequence
  Description of Artificial Sequence: Synthetic polynucleotide
atggctgccgatggttatcttccagattggctcgaggacactctctctgaaggaataagacagtggtggaagctcaaacctggcccaccaccaccaaagcccgcagagcggcataaggacgacagcaggggtcttgtgcttcctgggtacaagtacctcggacccttcaacggactcgacaagggagagccggtcaacgaggcagacgccgcggccctcgagcacgacaaagcctacgaccggcagctcgacagcggagacaacccgtacctcaagtacaaccacgccgacgcggagtttcaggagcgccttaaagaagatacgtcttttgggggcaacctcggacgagcagtcttccaggcgaaaaagagggttcttgaacctctgggcctggttgaggaacctgttaagacggctccgggaaaaaagaggccggtagagcactctcctgtggagccagactcctcctcgggaaccggaaaggcgggccagcagcctgcaagaaaaagattgaattttggtcagactggagacgcagactcagtacctgacccccagcctctcggacagccaccagcagccccctctggtctgggaactaatacgatggctacaggcagtggcgcaccaatggcagacaataacgagggcgccgacggagtgggtaattcctcgggaaattggcattgcgattccacatggatgggcgacagagtcatcaccaccagcacccgaacctgggccctgcccacctacaacaaccacctctacaaacaaatttccagccaatcaggagcctcgaacgacaatcactgctttggctacagcaccccttgggggtattttgacttcaacagattccactgccacttttcaccacgtgactggcaaagactcatcaacaacaactggggattccgacccaagagactcaacttcaagctctttaacattcaagtcaaagaggtcacgcagaatgacggtacgacgacgattgccaataaccttaccagcacggttcaggtgtttactgactcggagtaccagctcccgtacgtcctcggctcggcgcatcaaggatgcctcccgccgttcccagcagacgtcttcatggtgccacagtatggatacctcaccctgaacaacgggagtcaggcagtaggacgctcttcattttactgcctggagtactttccttctcagatgctgcgtaccggaaacaactttaccttcagctacacttttgaggacgttcctttccacagcagctacgctcacagccagagtctggaccgtctcatgaatcctctcatcgaccagtacctgtattacttgagcagaacaaacactccaagtggaaccaccacgcagtcaaggcttcagttttctcaggccggagcgagtgacattcgggaccagtctaggaactggcttcctggaccctgttaccgccagcagcgagtatcaaagacatctgcggataacaacaacagtgaatactcgtggactggagctaccaagtaccacctcaatggcagagactctctggtgaatccgggcccggccatggcaagccacaaggacgatgaagaaaagttttttcctcagagcggggttctcatctttgggaagcaaggctcagagaaaacaaatgtggacattgaaaaggtcatgattacagacgaagaggaaatcaggacaaccaatcccgtggctacggagcagtatggttctgtatctaccaacctccagagaggcaacagacaagcagctaccgcagatgtcaacacacaaggcgttcttccaggcatggtctggcaggacagagatgtgtaccttcaggggcccatctgggcaaagattccacacacggacggacattttcacccctctcccctcatgggtggattcggacttaaacaccctcctccacagattctcatcaagaacaccccggtacctgcgaatccttcgaccaccttcagtgcggcaaagtttgcttccttcatcacacagtactccacgggacaggtcagcgtggagatcgagtgggagctgcagaaggaaaacagcaaacgctggaatcccgaaattcagtacacttccaactacaacaagtctgttaatgtggactttactgtggacactaatggcgtgtattcagagcctcgccccattggcaccagatacctgactcgtaatctgtaa

SEQ ID NO: 4324 - DNA, 2208 bp, Artificial Sequence
  Description of Artificial Sequence: Synthetic polynucleotide
atggctgccgatggttatcttccagattggctcgaggacactctctctgaaggaataagacagtggtggaagctcaaacctggcccaccaccaccaaagcccgcagagcggcataaggacgacagcaggggtcttgtgcttcctgggtacaagtacctcggacccttcaacggactcgacaagggagagccggtcaacgaggcagacgccgcggccctcgagcacgacaaagcctacgaccggcagctcgacagcggagacaacccgtacctcaagtacaaccacgccgacgcggagtttcaggagcgccttaaagaagatacgtcttttgggggcaacctcggacgagcagtcttccaggcgaaaaagagggttcttgaacctctgggcctggttgaggaacctgttaagacggctccgggaaaaaagaggccggtagagcactctcctgtggagccagactcctcctcgggaaccggaaaggcgggccagcagcctgcaagaaaaagattgaattttggtcagactggagacgcagactcagtacctgacccccagcctctcggacagccaccagcagccccctctggtctgggaactaatacgatggctacaggcagtggcgcaccaatggcagacaataacgagggcgccgacggagtgggtaattcctcgggaaattggcattgcgattccacatggatgggcgacagagtcatcaccaccagcacccgaacctgggccctgcccacctacaacaaccacctctacaaacaaatttccagccaatcaggagcctcgaacgacaatcactactttggctacagcaccccttgggggtattttgacttcaacagattccactgccacttttcaccacgtgactggcaaagactcatcaacaacaactggggattccgacccaagagactcaacttcaagctctttaacattcaagtcaaagaggtcacgcagaatgacggtacgacgacgattgccaataaccttaccagcacggttcaggtgtttactgactcggagtaccagctcccgtacgtcctcggctcggcgcatcaaggatgcctcccgccgttcccagcagacgtcttcatggtgccacagtatggatacctcaccctgaacaacgggagtcaggcagtaggacgctcttcattttactgcctggagtactttccttctcagatgctgcgtaccggaaacaactttaccttcagctacacttttgaggacgttcctttccacagcagctacgctcacagccagagtctggaccgtctcatgaatcctctcatcgaccagtacctgtattacttgagcagaacaaacactccaagtggaaccaccacgcagtcaaggcttcagttttctcaggccggagcgagtgacattcgggaccagtctaggaactggcttcctggaccctgttaccgccagcagcgagtatcaaagacatctgcggataacaacaacagtgaatactcgtggactggagctaccaagtaccacctcaatggcagagactctctggtgaatccgggcccggccatggcaagccacaaggacgatgaagaaaagttttttcctcagagcggggttctcatctttgggaagcaaggctcagagaaaacaaatgtggacattgaaaaggtcatgattacagacgaagaggaaatcaggacaaccaatcccgtggctacggagcagtatggttctgtatctaccaacctccagagaggcaacagacaagcagctaccgcagatgtcaacacacaaggcgttcttccaggcatggtctggcaggacagagatgtgtaccttcaggggcccatctgggcaaagattccacacacggacggacattttcacccctctcccctcatgggtggattcggacttaaacaccctcctccacagattctcatcaagaacaccccggtacctgcgaatccttcgaccaccttcagtgcggcaaagtttgcttccttcatcacacagtactccacgggacaggtcagcgtggagatcgagtgggagctgcagaaggaaaacagcaaacgctggaatcccgaaattcagtacacttccaactacaacaagtctgttaatgcggactttactgtggacactaatggcgtgtattcagagcctcgccccattggcaccagatacctgactcgtaatctgtaa

SEQ ID NO: 4325 - DNA, 2208 bp, Artificial Sequence
  Description of Artificial Sequence: Synthetic polynucleotide
atggctgccgatggttatcttccagattggctcgaggacactctctctgaaggaataagacagtggtggaagctcaaacctggcccaccaccaccaaagcccgcagagcggcatagggacgacagcaggggtcttgtgcttcctgggtacaagtacctcggacccttcaacggactcgacaagggagagccggtcaacgaggcagacgccgcggccctcgagcacgacaaagcctacgaccggcagctcgacagcggagacaacccgtacctcaagtacaaccacgccgacgcggagtttcaggagcgccttaaagaagatacgtcttttgggggcaacctcggacgagcagtcttccaggcgaaaaagagggttcttgaacctctgggcctggttgaggaacctgttaagacggctccgggaaaaaagaggccggtagagcactctcctgtggagccagactcctcctcgggaaccggaaaggcgggccagcagcctgcaagaaaaagattgaattttggtcagactggagacgcagactcagtacctgacccccagcctctcggacagccaccagcagccccctctggtctgggaactaatacgatggctacaggcagtggcgcaccaatggcagacaataacgagggcgccgacggagtgggtaattcctcgggaaattggcattgcgattccacatggatgggcgacagagtcatcaccaccagcacccgaacctgggccctgcccacctacaacaaccacctctacaaacaaatttccagccaatcaggagcctcgaacggcaatcactactttggctacagcaccccttgggggtattttgacttcaacagattccactgccacttttcaccacgtgactggcaaagactcatcaacaacaactggggattccgacccaagagactcaacttcaagctctttaacattcaagtcaaagaggtcacgcagaatgacggtacgacgacgattgccaataaccttaccagcacggttcaggtgtttactgactcggagtaccagctcccgtacgtcctcggctcggcgcatcaaggatgcctcccgccgttcccagcagacgtcttcatggtgccacagtatggatacctcaccctgaacaacgggagtcaggcagtaggacgctcttcattttactgcctggagtactttccttctcagatgctgcgtaccggaaacaactttaccttcagctacacttttgaggacgttcctttccacagcagctacgctcacagccagagtctggaccgtctcatgaatcctctcatcgaccagtacctgtattacttgagcagaacaaacactccaagtggaaccaccacgcagtcaaggcttcagttttctcaggccggagcgagtgacattcgggaccagtctaggaactggcttcctggaccctgttaccgccagcagcgagtatcaaagacatctgcggataacaacaacagtgaatactcgtggactggagctaccaagtaccacctcaatggcagagactctctggtgaatccgggcccggccatggcaagccacaaggacgatgaagaaaagttttttcctcagagcggggttctcatctttgggaagcaaggctcagagaaaacaaatgtggacattgaaaaggtcatgattacagacgaagaggaaatcaggacaaccaatcccgtggctacggagcagtatggttctgtatctaccaacctccagaggggcaacagacaagcagctaccgcagatgtcaacacacaaggcgttcttccaggcatggtctggcaggacagagatgtgtaccttcaggggcccatctgggcaaagattccacacacggacggacattttcacccctctcccctcatgggtggattcggacttaaacaccctcctccacagattctcatcaagaacaccccggtacctgcgaatccttcgaccaccttcagtgcggcaaagtttgcttccttcatcacacagtactccacgggacaggtcagcgtggagatcgagtgggagctgcagaaggaaaacagcaaacgctggaatcccgaaattcagtacacttccaactacaacaagtctgttaatgtggactttactgtggacactaatggcgtgtattcagagcctcgccccattggcaccagatacctgactcgtaatctgtaa

SEQ ID NO: 4326 - DNA, 2208 bp, Artificial Sequence
  Description of Artificial Sequence: Synthetic polynucleotide
atggctgccgatggttatcttccagattggctcgaggacactctctctgaaggaataagacagtggtggaagctcaaacctggcccaccaccaccaaagcccgcagagcggcataaggacgacagcaggggtcttgtgcttcctgggtacaagtacctcggacccttcaacggactcgacaagggagagccggtcaacgaggcagacgccgcggccctcgagcacgacaaagcctacgaccggcagctcgacagcggagacaacccgtacctcaagtacaaccacgccgacgcggagtttcaggagcgccttaaagaagatacgtcttttgggggcaacctcggacgagcagtcttccaggcgaaaaagagggttcttgaacctctgggcctggttgaggaacctgttaagacggctccgggaaaaaagaggccggtagagcactctcctgtggagccagactcctcctcgggaaccggaaaggcgggccagcagcctgcaagaaaaagattgaattttggtcagactggagacgcagactcagtacctgacccccagcctctcggacagccaccagcagccccctctggtctgggaactaatacgatggctacaggcagtggcgcaccaatggcagacaataacgagggcgccgacggagtgggtaattcctcgggaaattggcattgcgattccacatggatgggcgacagagtcatcaccaccagcacccgaacctgggccctgcccacctacaacaaccacctctacaaacaaatttccagccaatcaggagcctcgaacgacaatcactactttggctacagcaccccttgggggtattttgacttcaacagattccactgccacttttcaccacgtgactggcaaagactcatcaacaacaactggggattccgacccaagagactcaacttcaagctctttaacattcaagtcaaagaggtcacgcagaatgacggtacgacgacgattgccaataaccttaccagcacggttcaggtgtttactgactcggagtaccagctcccgtacgtcctcggctcggcgcatcaaggatgcctcccgccgttcccagcagacgtcttcatggtgccacagtatggatacctcaccctgaacaacgggagtcgggcagtaggacgctcttcattttactgcctggagtactttccttctcagatgctgcgtaccggaaacaactttaccttcagctacacttttgaggacgttcctttccacagcagctacgctcacagccagagtctggaccgtctcatgaatcctctcatcgaccagtacctgtattacttgagcagaacaaacactccaagtggaaccaccacgcagtcaaggcttcagttttctcaggccggagcgagtgacattcgggaccagtctaggaactggcttcctggaccctgttaccgccagcagcgagtatcaaaggcatctgcggataacaacaacagtgaatactcgtggactggagctaccaagtaccacctcaatggcagagactctctggtgaatccgggcccggccatggcaagccacaaggacgatgaagaaaagttttttcctcagagcggggttctcatctttgggaagcaaggctcagagaaaacaaatgtggacattgaaaaggtcatgattacagacgaagaggaaatcaggacaaccaatcccgtggctacggagcagtatggttctgtatctaccaacctccagagaggcaacagacaagcagctaccgcagatgtcaacacacaaggcgttcttccaggcatggtctggcaggacagagatgtgtaccttcaggggcccatctgggcaaagattccacacacggacggacattttcacccctctcccctcatgggtggattcggacttaaacaccctcctccacagattctcatcaagaacaccccggtacctgcgaatccttcgaccaccttcagtgcggcaaagtttgcttccttcatcacacagtactccacgggacaggtcagcgtggagatcgagtgggagctgcagaaggaaaacagcaaacgctggaatcccgaaattcagtacacttccaactacaacaagtctgttaatgtggactttactgtggacactaatggcgtgtattcagagcctcgccccattggcaccagatacctgactcgtaatctgtaa

SEQ ID NO: 4327 - DNA, 2208 bp, Artificial Sequence
  Description of Artificial Sequence: Synthetic polynucleotide
atggctgccgatggttatcttccagattggctcgaggacactctctctgaaggaataagacagtggtggaagctcaaacctggcccaccaccaccaaagcccgcagagcggcatagggacgacagcaggggtcttgtgcttcctgggtacaagtacctcggacccttcaacggactcgacaagggagagccggtcaacgaggcagacgccgcggccctcgagcacgacaaagcctacgaccggcagctcgacagcggagacaacccgtacctcaagtacaaccacgccgacgcggagtttcaggagcgccttaaagaagatacgtcttttgggggcaacctcggacgagcagtcttccaggcgaaaaagagggttcttgaacctctgggcctggttgaggaacctgttaagacggctccgggaaaaaagaggccggtagagcactctcctgtggagccagactcctcctcgggaaccggaaaggcgggccagcagcctgcaagaaaaagattgaattttggtcagactggagacgcagactcagtacctgacccccagcctctcggacagccaccagcagccccctctggtctgggaactaatacgatggctacaggcagtggcgcaccaatggcagacaataacgagggcgccgacggagtgggtaattcctcgggaaattggcattgcgattccacatggatgggcgacagagtcatcaccaccagcacccgaacctgggccctgcccacctacaacaaccacctctacaaacaaatttccagccaatcaggagcctcgaacggcaatcactactttggctacagcaccccttgggggtattttgacttcaacagattccactgccacttttcaccacgtgactggcaaagactcatcaacaacaactggggattccgacccaagagactcaacttcaagctctttaacattcaagtcaaagaggtcacgcagaatgacggtacgacgacgattgccaataaccttaccagcacggttcaggtgtttactgactcggagtaccagctcccgtacgtcctcggctcggcgcatcaaggatgcctcccgccgttcccagcagacgtcttcatggtgccacagtatggatacctcaccctgaacaacgggagtcaggcagtaggacgctcttcattttactgcctggagtactttccttctcagatgctgcgtaccggaaacaactttaccttcagctacacttttgaggacgttcctttccacagcagctacgctcacagccagagtctggaccgtctcatgaatcctctcatcgaccagtacctgtattacttgagcagaacaaacactccaagtggaaccaccacgcagtcaaggcttcagttttctcaggccggagcgagtggcattcgggaccagtctaggaactggcttcctggaccctgttaccgccagcagcgagtatcaaagacatctgcggataacaacaacagtgaatactcgtggactggagctaccaagtaccacctcaatggcagagactctctggtgaatccgggcccggccatggcaagccacaaggacgatgaagaaaagttttttcctcagagcggggttctcatctttgggaagcaaggctcagagaaaacaaatgtggacattgaaaaggtcatgattacagacgaagaggaaatcaggacaaccaatcccgtggctacggagcagtatggttctgtatctaccaacctccagaggggcaacagacaagcagctaccgcagatgtcaacacacaaggcgttcttccaggcatggtctggcaggacagagatgtgtaccttcaggggcccatctgggcaaagattccacacacggacggacattttcacccctctcccctcatgggtggattcggacttaaacaccctcctccacagattctcatcaagaacaccccggtacctgcgaatccttcgaccaccttcagtgcggcaaagtttgcttccttcatcacacagtactccacgggacaggtcagcgtggagatcgagtgggagctgcagaaggaaaacagcaaacgctggaatcccgaaattcagtacacttccaactacaacaagtctgttaatgtggactttactgtggacactaatggcgtgtattcagagcctcgccccattggcaccagatacctgactcgtaatctgtaa

SEQ ID NO: 4328 - DNA, 2208 bp, Artificial Sequence
  Description of Artificial Sequence: Synthetic polynucleotide
atggctgccgatggttatcttccagattggctcgaggacactctctctgaaggaataagacagtggtggaagctcaaacctggcccaccaccaccaaagcccgcagagcggcatagggacgacagcaggggtcttgtgcttcctgggtacaagtacctcggacccttcaacggactcgacaagggagagccggtcaacgaggcagacgccgcggccctcgagcacgacaaagcctacgaccggcagctcgacagcggagacaacccgtacctcaagtacaaccacgccgacgcggagtttcaggagcgccttaaagaagatacgtcttttgggggcaacctcggacgagcagtcttccaggcgaaaaagagggttcttgaacctctgggcctggttgaggaacctgttaagacggctccgggaaaaaagaggccggtagagcactctcctgtggagccagactcctcctcgggaaccggaaaggcgggccagcagcctgcaagaaaaagattgaattttggtcagactggagacgcagactcagtacctgacccccagcctctcggacagccaccagcagccccctctggtctgggaactaatacgatggctacaggcagtggcgcaccaatggcagacaataacgagggcgccgacggagtgggtaattcctcgggaaattggcattgcgattccacatggatgggcgacagagtcatcaccaccagcacccgaacctgggccctgcccacctacaacaaccacctctacaaacaaatttccagccaatcaggagcctcgaacggcaatcactactttggctacagcaccccttgggggtattttgacttcaacagattccactgccacttttcaccacgtgactggcaaagactcatcaacaacaactggggattccgacccaagagactcaacttcaagctctttaacattcaagtcaaagaggtcacgcagaatgacggtacgacgacgattgccaataaccttaccagcacggttcaggtgtttactgactcggagtaccagctcccgtacgtcctcggctcggcgcatcaaggatgcctcccgccgttcccagcagacgtcttcatggtgccacagtatggatacctcaccctgaacaacgggagtcaggcagtaggacgctcttcattttactgcctggagtactttccttctcagatgctgcgtaccggaaacaactttaccttcagctacacttttgaggacgttcctttccacagcaactacgctcacagccagagtctggaccgtctcatgaatcctctcatcgaccagtacctgtattacttgagcagaacaaacactccaagtggaaccaccacgcagtcaaggcttcagttttctcaggccggagcgagtgacattcgggaccagtctaggaactggcttcctggaccctgttaccgccagcagcgagtatcaaagacatctgcggataacaacaacagtgaatactcgtggactggagctaccaagtaccacctcaatggcagagactctctggtgaatccgggcccggccatggcaagccacaaggacgatgaagaaaagttttttcctcagagcggggttctcatctttgggaagcaaggctcagagaaaacaaatgtggacattgaaaaggtcatgattacagacgaagaggaaatcaggacaaccaatcccgtggctacggagcagtatggttctgtatctaccaacctccagaggggcaacagacaagcagctaccgcagatgtcaacacacaaggcgttcttccaggcatggtctggcaggacagagatgtgtaccttcaggggcccatctgggcaaagattccacacacggacggacattttcacccctctcccctcatgggtggattcggacttaaacaccctcctccacagattctcatcaagaacaccccggtacctgcgaatccttcgaccaccttcagtgcggcaaagtttgcttccttcatcacacagtactccacgggacaggtcagcgtggagatcgagtgggagctgcagaaggaaaacagcaaacgctggaatcccgaaattcagtacacttccaactacaacaagtctgttaatgtggactttactgtggacactaatggcgtgtattcagagcctcgccccattggcaccagatacctgactcgtaatctgtaa

SEQ ID NO: 4329 - DNA, 2208 bp, Artificial Sequence
  Description of Artificial Sequence: Synthetic polynucleotide
atggctgccgatggttatcttccagattggctcgaggacactctctctgaaggaataagacagtggtggaagctcaaacctggcccaccaccaccaaagcccgcagagcggcataaggacgacagcaggggtcttgtgcttcctgggtacaagtacctcggacccttcaacggactcgacaagggagagccggtcaacgaggcagacgccgcggccctcgagcacgacaaagcctacgaccggcagctcgacagcggagacaacccgtacctcaagtacaaccacgccgacgcggagtttcaggagcgccttaaagaagatacgtcttttgggggcaacctcggacgagcagtcttccaggcgaaaaagagggttcttgaacctctgggcctggttgaggaacctgttaagacggctccgggaaaaaagaggccggtagagcactctcctgtggagccagactcctcctcgggaaccggaaaggcgggccagcagcctgcaagaaaaagattgaattttggtcagactggagacgcagactcagtacctgacccccagcctctcggacagccaccagcagccccctctggtctgggaactaatacgatggctacaggcagtggcgcaccaatggcagacaataacgagggcgccgacggagtgggtaattcctcgggaaattggcattgcgattccacatggatgggcgacagagtcatcaccaccagcacccgaacctgggccctgcccacctacaacaaccacctctacaaacaaatttccagccaatcaggagcctcgaacgacaatcactactttggctacagcaccccttgggggtattttgacttcaacagattccactgccacttttcaccacgtgactggcaaagactcatcaacaacaactggggattccgacccaagagactcaacttcaagctctttaacattcaagtcaaagaggtcacgcagaatgacggtacgacgacgattgccaataaccttaccagcacggttcaggtgtttactgactcggagtaccagctcccgtacgtcctcggctcggcgcatcaaggatgcctcccgccgttcccagcagacgtcttcatggtgccacagtatggatacctcaccctgaacaacgggagtcaggcagtaggacgctcttcattttactgcctggagtactttccttctcagatgctgcgtaccggaaacaactttaccttcagctacacttttgaggacgttcctttccacagcagctacgctcacagccagagtctggaccgtctcatgaatcctctcatcgaccagtacctgtattacttgagcagaacaaacactccaagtggaaccaccacgcagtcaaggcttcagttttctcaggccggagcgagtgacattcgggaccagtctaggaactggcttcctggaccctgttaccgccagcagcgagtatcaaagacatctgcggataacaacaacagtgaatactcgtggactggagctaccaagtaccacctcaatggcagagactctctggtgaatccgggcccggccatggcaagccacaaggacgatgaagaaaagttttttcctcagagcggggttctcatctttgggaagcaaggctcagagaaaacaaatgtggacattgaaaaggtcatgattacagacgaagaggaaatcaggacaaccaatcccgtggctacggagcagtatggttctgtatctaccaacctccagagaggcaacagacaagcagctaccgcagatgtcaacacacaaggcgttcttccaggcatggtctggcaggacagagatgtgtaccttcaggggcccatctgggcaaagattccacacacggacggacattttcacccctctcccctcatgggtggattcggacttaaacaccctcctccacagattctcatcaagaacaccccggtacctgcgaatccttcgaccaccttcagtgcggcaaagtttgcttccttcatcacacagtactccgcgggacaggtcagcgtggagatcgagtgggagctgcagaaggaaaacagcaaacgctggaatcccgaaattcagtacacttccaactacaacaagtctgttaatgtggactttactgtggacactaatggcgtgtattcagagcctcgccccattggcaccagatacctgactcgtaatctgtaa

SEQ ID NO: 4330 - DNA, 2208 bp, Artificial Sequence
  Description of Artificial Sequence: Synthetic polynucleotide
atggctgccgatggttatcttccagattggctcgaggacactctctctgaaggaataagacagtggtggaagctcaaacctggcccaccaccaccaaagcccgcagagcggcataaggacgacagcaggggtcttgtgcttcctgggtacaagtacctcggacccttcaacggactcgacaagggagagccggtcaacgaggcagacgccgcggccctcgagcacgacaaagcctacgaccggcagctcgacagcggagacaacccgtacctcaagtacaaccacgccgacgcggagtttcaggagcgccttaaagaagatacgtcttttgggggcaacctcggacgagcagtcttccaggcgaaaaagagggttcttgaacctctgggcctggttgaggaacctgttaagacggctccgggaaaaaagaggccggtagagcactctcctgtggagccagactcctcctcgggaaccggaaaggcgggccagcagcctgcaagaaaaagattgaattttggtcagactggagacgcagactcagtacctgacccccagcctctcggacagccaccagcagccccctctggtctgggaactaatacgatggctacaggcagtggcgcaccaatggcagacaataacgagggcgccgacggagtgggtaattcctcgggaaattggcattgcgattccacatggatgggcgacagagtcatcaccaccagcacccgaacctgggccctgcccacctacaacaaccacctctacaaacaaatttccagccaatcaggagcctcgaacgacaatcactactttggctacagcaccccttgggggtattttgacttcaacagattccactgccacttttcaccacgtgactggcaaagactcatcaacaacaactggggattccgacccaagagactcaacttcaagctctttaacattcaagtcaaagaggtcacgcagaatgacggtacgacgacgattgccaataaccttaccagcacggttcaggtgtttactgactcggagtaccagctcccgtacgtcctcggctcggcgcatcaaggatgcctcccgccgttcccagcagacgtcttcatggtgccacagtatggatacctcaccctgaacaacgggagtcaggcagtaggacgctcttcattttactgcctggagtactttccttctcagatgctgcgtaccggaaacaactttaccttcagctacacttttgaggacgttcctttccacagcagctacgctcacagccagagtctggaccgtctcatgaatcctctcatcgaccagtacctgtattacttgagcagaacaaacactccaagtggaaccaccacgcagtcaaggcttcagttttctcaggccggagcgagtgacattcgggaccagtctaggaactggcttcctggaccctgttaccgccagcagcgagtatcaaagacatctgcggataacaacaacagtgaatactcgtggactggagctaccaagtaccacctcaatggcagagactctctggtgaatccgggcccggccatggcaagccacaaggacgatgaagaaaagttttttcctcagagcggggttctcatctttgggaagcaaggctcagagaaaacaaatgtggacattgaaaaggtcatgattacagacgaagaggaaatcaggacaaccaatcccgtggctacggagcagtatggttctgtatctaccaacctccagagaggcaacagacaagcagctaccgcagatgtcaacacacaaggcgttcttccaggcatggtctggcaggacagagatgtgtaccttcaggggcccatctgggcaaagattccacacacggacggacattttcacccctctcccctcatgggtggattcggacttaaacaccctcctccacagattctcatcaagaacaccccggtacctgcgaatccttcgaccaccttcagtgcggcaaagtttgcttccttcatcacacagtactccacgggacaggtcagcgtggagatcgagtgggagctgcagaaggaaaacagcaaacgctggaatcccgaaattcagtacacttccaactacaacaagtctgttaatgtggactttactgtggacactgatggcgtgtattcagagcctcgccccattggcaccagatacctgactcgtaatctgtaa

SEQ ID NO: 4331 - DNA, 2208 bp, Artificial Sequence
  Description of Artificial Sequence: Synthetic polynucleotide
atggctgccgatggttatcttccagattggctcgaggacactctctctgaaggaataagacagtggtggaagctcaaacctggcccaccaccaccaaagcccgcagagcggcataaggacgacagcaggggtcttgtgcttcctgggtacaagtacctcggacccttcaacggactcgacaagggagagccggtcaacgaggcagacgccgcggccctcgagcacgacaaagcctacgaccggcagctcgacagcggagacaacccgtacctcaagtacaaccacgccgacgcggagtttcaggagcgccttaaagaagatacgtcttttgggggcaacctcggacgagcagtcttccaggcgaaaaagagggttcttgaacctctgggcctggttgaggaacctgttaagacggctccgggaaaaaagaggccggtagagcactctcctgtggagccagactcctcctcgggaaccggaaaggcgggccagcagcctgcaagaaaaagattgaattttggtcagactggagacgcagactcagtacctgacccccagcctctcggacagccaccagcagccccctctggtctgggaactaatacgatggctacaggcagtggcgcaccaatggcagacaataacgagggcgccgacggagtgggtaattcctcgggaaattggcattgcgattccacatggatgggcgacagagtcatcaccaccagcacccgaacctgggccctgcccacctacaacaaccacctctacaaacaaatttccagccaatcaggagcctcgaacgacaatcactactttggctacagcaccccttgggggtattttgacttcaacagattccactgccacttttcaccacgtgactggcaaagactcatcaacaacaactggggattccgacccaagagactcaacttcaagctctttaacattcaagtcaaagaggtcacgcagaatgacggtacgacgacgattgccaataaccttaccagcacggttcaggtgtttactgactcggagtaccagctcccgtacgtcctcggctcggcgcatcaaggatgcctcccgccgttcccagcagacgtcttcatggtgccacagtatggatacctcaccctgaacaacgggagtcaggcagtaggacgctcttcattttactgcctggagtactttccttctcagatgctgcgtaccggaaacaactttaccttcagctacacttttgaggacgttcctttccacagcagctacgctcacagccagagtctggaccgtctcatgaatcctctcatcgaccagtacctgtattacttgagcagaacaaacactccaagtggaaccaccacgcagtcaaggcttcagttttctcaggccggagcgagtgacattcgggaccagtctaggaactggcttcctggaccctgttaccgccagcagcgagtatcaaagacatctgcggataacaacaacagtgaatactcgtggactggagctaccaagtaccacctcaatggcagagactctctggtgaatccgggcccggccatggcaagccacaaggacgatgaagaaaagttttttcctcagagcggggttctcatctttgggaagcaaggctcagagaaaacaaatgtggacattgaaaaggtcatgattacagacgaagaggaaatcaggacaaccaatcccgtggctacggagcagtatggttctgtatctaccaacctccagagaggcaacagacaagcagctaccgcagatgtcaacacacaaggcgttcttccaggcatggtctggcagggcagagatgtgtaccttcaggggcccatctgggcaaagattccacacacggacggacattttcacccctctcccctcatgggtggattcggacttaaacaccctcctccacagattctcatcaagaacaccccggtacctgcgaatccttcgaccaccttcagtgcggcaaagtttgcttccttcatcacacagtactccacgggacaggtcagcgtggagatcgagtgggagctgcagaaggaaaacagcaaacgctggaatcccgaaattcagtacacttccaactacaacaagtctgttaatgtggactttactgtggacactaatggcgtgtattcagagcctcgccccattggcaccagatacctgactcgtaatctgtaa

SEQ ID NO: 4332 - DNA, 2208 bp, Artificial Sequence
  Description of Artificial Sequence: Synthetic polynucleotide
atggctgccgatggttatcttccagattggctcgaggacactctctctgaaggaataagacagtggtggaagctcaaacctggcccaccaccaccaaagcccgcagagcggcataaggacgacagcaggggtcttgtgcttcctgggtacaagtacctcggacccttcaacggactcgacaagggagagccggtcaacgaggcagacgccgcggccctcgagcacgacaaagcctacgaccggcagctcgacagcggagacaacccgtacctcaagtacaaccacgccgacgcggagtttcaggagcgccttaaagaagatacgtcttttgggggcaacctcggacgagcagtcttccaggcgaaaaagagggttcttgaacctctgggcctggttgaggaacctgttaagacggctccgggaaaaaaggggccggtagagcactctcctgtggagccagactcctcctcgggaaccggaaaggcgggccagcagcctgcaagaaaaagattgaattttggtcagactggagacgcagactcagtacctgacccccagcctctcggacagccaccagcagccccctctggtctgggaactaatacgatggctacaggcagtggcgcaccaatggcagacaataacgagggcgccgacggagtgggtaattcctcgggaaattggcattgcgattccacatggatgggcgacagagtcatcaccaccagcacccgaacctgggccctgcccacctacaacaaccacctctacaaacaaatttccagccaatcaggagcctcgaacgacaatcactactttggctacagcaccccttgggggtattttgacttcaacagattccactgccacttttcaccacgtgactggcaaagactcatcaacaacaactggggattccgacccaagagactcaacttcaagctctttaacattcaagtcaaagaggtcacgcagaatgacggtacgacgacgattgccaataaccttaccagcacggttcaggtgtttactgactcggagtaccagctcccgtacgtcctcggctcggcgcatcaaggatgcctcccgccgttcccagcagacgtcttcatggtgccacagtatggatacctcaccctgaacaacgggagtcaggcagtaggacgctcttcattttactgcctggagtactttccttctcagatgctgcgtaccggaaacaactttaccttcagctacacttttgaggacgttcctttccacagcagctacgctcacagccagagtctggaccgtctcatgaatcctctcatcgaccagtacctgtattacttgagcagaacaaacactccaagtggaaccaccacgcagtcaaggcttcagttttctcaggccggagcgagtgacattcgggaccagtctaggaactggcttcctggaccctgttaccgccagcagcgagtatcaaagacatctgcggataacaacaacagtgaatactcgtggactggagctaccaagtaccacctcaatggcagagactctctggtgaatccgggcccggccatggcaggccacaaggacgatgaagaaaagttttttcctcagagcggggttctcatctttgggaagcaaggctcagagaaaacaaatgtggacattgaaaaggtcatgattacagacgaagaggaaatcaggacaaccaatcccgtggctacggagcagtatggttctgtatctaccaacctccagagaggcaacagacaagcagctaccgcagatgtcaacacacaaggcgttcttccaggcatggtctggcaggacagagatgtgtaccttcaggggcccatctgggcaaagattccacacacggacggacattttcacccctctcccctcatgggtggattcggacttaaacaccctcctccacagattctcatcaagaacaccccggtacctgcgaatccttcgaccaccttcagtgcggcaaagtttgcttccttcatcacacagtactccacgggacaggtcagcgtggagatcgagtgggagctgcagaaggaaaacagcaaacgctggaatcccgaaattcagtacacttccaactacaacaagtctgttaatgtggactttactgtggacactaatggcgtgtattcagagcctcgccccattggcaccagatacctgactcgtaatctgtaa

SEQ ID NO: 4333 - DNA, 2208 bp, Artificial Sequence
  Description of Artificial Sequence: Synthetic polynucleotide
atggctgccgatggttatcttccagattggctcgaggacactctctctgaaggaataagacagtggtggaagctcaaacctggcccaccaccaccaaagcccgcagagcggcataaggacgacagcaggggtcttgtgcttcctgggtacaagtacctcggacccttcaacggactcgacaagggagagccggtcaacgaggcagacgccgcggccctcgagcacgacaaagcctacgaccggcagctcgacagcggagacaacccgtacctcaagtacaaccacgccgacgcggagtttcaggagcgccttaaagaagatacgtcttttgggggcaacctcggacgagcagtcttccaggcgaaaaagagggttcttgaacctctgggcctggttgaggaacctgttaagacggctccgggaaaaaagaggctggtagagcactctcctgtggagccagactcctcctcgggaaccggaaaggcgggccagcagcctgcaagaaaaagattgaattttggtcagactggagacgcagactcagtacctgacccccagcctctcggacagccaccagcagccccctctggtctgggaactaatacgatggctacaggcagtggcgcaccaatggcagacaataacgagggcgccgacggagtgggtaattcctcgggaaattggcattgcgattccacatggatgggcgacagagtcatcaccaccagcacccgaacctgggccctgcccacctacaacaaccacctctacaaacaaatttccagccaatcaggagcctcgaacgacaatcactactttggctacagcaccccttgggggtattttgacttcaacagattccactgccacttttcaccacgtgactggcaaagactcatcaacaacaactggggattccgacccaagagactcaacttcaagctctttaacattcaagtcaaagaggtcacgcagaatgacggtacgacgacgattgccaataaccttaccagcacggttcaggtgtttactgactcggagtaccagctcccgtacgtcctcggctcggcgcatcaaggatgcctcccgccgttcccagcagacgtcttcatggtgccacagtatggatacctcaccctgaacaacgggagtcaggcagtaggacgctcttcattttactgcctggagtactttccttctcagatgctgcgtaccggaaacaactttaccttcagctacacttttgaggacgttcctttccacagcagctacgctcacagccagagtctggaccgtctcatgaatcctctcatcgaccagtacctgtattacttgagcagaacaaacactccaagtggaaccaccacgcagtcaaggcttcagttttctcaggccggagcgagtgacattcgggaccagtctaggaactggcttcctggaccctgttaccgccagcagcgagtatcaaagacatctgcggataacaacaacagtgaatactcgtggactggagctaccaagtaccacctcaatggcagagactctctggtgaatccgggcccggccatggcaagccacaaggacgatgaagaaaagttttttcctcagagcggggttctcatctttgggaagcaaggctcagagaaaacaaatgtggacattgaaaaggtcatgattacagacgaagaggaaatcaggacaaccaatcccgtggctacggagcagtatggttctgtatctaccaacctccagagaggcaacagacaagcagctaccgcagatgtcaacacacaaggcgttcttccaggcatggtctggcaggacagagatgtgtaccttcaggggcccatctgggcaaagattccacacacggacggacattttcacccctctcccctcatgggtggattcggacttaaacaccctcctccacagattctcatcaagaacaccccggtacctgcgaatccttcgaccaccttcagtgcggcaaagtttgcttccttcatcacacagtactccacgggacaggtcagcgtggagatcgagtgggagctgcagaaggaaaacagcaaacgctggaatcccgaaattcagtacacttccaactacaacaagtctgttaatgtggactttactgtggacactaatggcgtgtattcagagcctcgccccattggcaccagatacctgactcgtaatctgtaa

SEQ ID NO: 4334 - DNA, 2208 bp, Artificial Sequence
  Description of Artificial Sequence: Synthetic polynucleotide
atggctgccgatggttatcttccagattggctcgaggacactctctctgaaggaataagacagtggtggaagctcaaacctggcccaccaccaccaaagcccgcagagcggcataaggacgacagcaggggtcttgtgcttcctgggtacaagtacctcggacccttcaacggactcgacaagggagagccggtcaacgaggcaggcgccgcggccctcaagcacgacaaagcctacgaccggcagctcgacagcggagacaacccgtacctcaagtacaaccacgccgacgcggagtttcaggagcgccttaaagaagatacgtcttttgggggcaacctcggacgagcagtcttccaggcgaaaaagagggttcttgaacctctgggcctggttgaggaacctgttaagacggctccgggaaaaaagaggccggtagagcactctcctgtggagccagactcctcctcgggaaccggaaaggcgggccagcagcctgcaagaaaaagattgaattttggtcagactggagacgcagactcagtacctgacccccagcctctcggacagccaccagcagccccctctggtctgggaactaatacgatggctacaggcagtggcgcaccaatggcagacaataacgagggcgccgacggagtgggtaattcctcgggaaattggcattgcgattccacatggatgggcgacagagtcatcaccaccagcacccgaacctgggccctgcccacctacaacaaccacctctacaaacaaatttccagccaatcaggagcctcgaacgacaatcactactttggctacagcaccccttgggggtattttgacttcaacagattccactgccacttttcaccacgtgactggcaaagactcatcaacaacaactggggattccgacccaagagactcaacttcaagctctttaacattcaagtcaaagaggtcacgcagaatgacggtacgacgacgattgccaataaccttaccagcacggttcaggtgtttactgactcggagtaccagctcccgtacgtcctcggctcggcgcatcaaggatgcctcccgccgttcccagcagacgtcttcatggtgccacagtatggatacctcaccctgaacaacgggagtcaggcagtaggacgctcttcattttactgcctggagtactttccttctcagatgctgcgtaccggaaacaactttaccttcagctacacttttgaggacgttcctttccacagcagctacgctcacagccagagtctggaccgtctcatgaatcctctcatcgaccagtacctgtattacttgagcagaacaaacactccaagtggaaccaccacgcagtcaaggcttcagttttctcaggccggagcgagtgacattcgggaccagtctaggaactggcttcctggaccctgttaccgccagcagcgagtatcaaagacatctgcggataacaacaacagtgaatactcgtggactggagctaccaagtaccacctcaatggcagagactctctggtgaatccgggcccggccatggcaagccacaaggacgatgaagaaaagttttttcctcagagcggggttctcatctttgggaagcaaggctcagagaaaacaaatgtggacattgaaaaggtcatgattacagacgaagaggaaatcaggacaaccaatcccgtggctacggagcagtatggttctgtatctaccaacctccagagaggcaacagacaagcagctaccgcagatgtcaacacacaaggcgttcttccaggcatggtctggcaggacagagatgtgtaccttcaggggcccatctgggcaaagattccacacacggacggacattttcacccctctcccctcatgggtggattcggacttaaacaccctcctccacagattctcatcaagaacaccccggtacctgcgaatccttcgaccaccttcagtgcggcaaagtttgcttccttcatcacacagtactccacgggacaggtcagcgtggagatcgagtgggagctgcagaaggaaaacagcaaacgctggaatcccgaaattcagtacacttccaactacaacaagtctgttaatgtggactttactgtggacactaatggcgtgtattcagagcctcgccccattggcaccagatacctgactcgtaatctgtaa

SEQ ID NO: 4335 - DNA, 2208 bp, Artificial Sequence
  Description of Artificial Sequence: Synthetic polynucleotide
atggctgccgatggttatcttccagattggctcgaggacactctctctgaaggaataagacagtggtggaagctcaaacctggcccaccaccaccaaagcccgcagagcggcataaggacgacagcaggggtcttgtgcttcctgggtacaagtacctcggacccttcaacggactcgacaagggagagccggtcaacgaggcagacgccgcggccctcgagcacgacaaagcctacgaccggcagctcgacagcggagacaacccgtacctcaagtacaaccacgccgacgcggagtttcaggagcgccttaaagaagatacgtcttttgggggcaacctcggacgagcagtcttccaggcgaaaaagagggttcttgaacctctgggcctggttgaggaacctgttaagacggctccgggaaaaaagaggccggtagagcactctcctgtggagccagactcctcctcgggaaccggaaaggcgggccagcagcctgcaagaaaaagattgaattttggtcagactggagacgcagactcagtacctgacccccagcctctcggacagccaccagcagccccctctggtctgggaactaatacgatggctacaggcagtggcgcaccaatggcagacaataacgagggcgccgacggagtgggtaattcctcgggaaattggcattgcgattccacatggatgggcgacagagtcatcaccaccagcacccgaacctgggccctgcccacctacaacaaccacctctacaaacaaatttccagccaatcaggagcctcgaacgacaatcactactttggctacagcaccccttgggggtattttgacttcaacagattccactgccacttttcaccacgtgactggcaaagactcatcaacaacaactggggattccgacccaagagactcaacttcaagctctttaacattcaagtcaaagaggtcacgcagaatgacggtacgacgacgattgccaataaccttaccagcacggttcaggtgtttactgactcggagtaccagctcccgtacgtcctcggctcggcgcatcaaggatgcctcccgccgttcccagcagacgtcttcatggtgccacagtatggatacctcaccctgaacaacgggagtcaggcagtaggacgctcttcattttactgcctggagtactttccttctcagatgctgcgtaccggaaacaactttaccttcagctacacttttgaggacgttcctttccacagcagctacgctcacagccagagtctggaccgtctcatgaatcctctcatcgaccagtacctgtattacttgagcagaacaaacactccaagtggaaccaccacgcagtcaaggcttcagttttctcaggccggagcgagtggcattcgggaccagtctaggaactggcttcctggaccctgttaccgccagcagcgagtatcaaagacatctgcggataacaacaacagtgaatactcgtggactggagctaccaagtaccacctcaatggcagagactctctggtgaatccgggcccggccatggcaagccacaaggacgatgaagaaaagttttttcctcagagcggggttctcatctttgggaagcaaggctcagagaaaacaaatgtggacattgaaaaggtcatgattacagacgaagaggaaatcaggacaaccaatcccgtggctacggagcagtatggttctgtatctaccaacctccagagaggcaacagacaagcagctaccgcagatgtcaacacacaaggcgttcttccaggcatggtctggcaggacagagatgtgtaccttcaggggcccatctgggcaaagattccacacacggacggacattttcacccctctcccctcatgggtggattcggacttaaacaccctcctccacagattctcatcaagaacaccccggtacctgcgaatccttcgaccaccttcagtgcggcaaagtttgcttccttcatcacacagtactccacgggacaggtcagcgtggagatcgagtgggagctgcagaaggaaaacagcaaacgctggaatcccgaaattcagtacacttccaactacaacaagtctgttaatgtggactttactgtggacactaatggcgtgtattcagagcctcgccccattggcaccagatacctgactcgtaatctgtaa

SEQ ID NO: 4336 - DNA, 2208 bp, Artificial Sequence
  Description of Artificial Sequence: Synthetic polynucleotide
atggctgccgatggttatcttccagattggctcgaggacactctctctgaaggaataagacagtggtggaagctcaaacctggcccaccaccaccaaagcccgcagagcggcataaggacgacagcaggggtcttgtgcttcctgggtacaagtacctcggacccttcaacggactcgacaagggagagccggtcaacgaggcagacgccgcggccctcgagcacgacaaagcctacgaccggcagctcgacagcggagacaacccgtacctcaagtacaaccacgccgacgcggagtttcaggagcgccttaaagaagatacgtcttttgggggcaacctcggacgagcagtcttccaggcgaaaaagagggttcttgaacctctgggcctggttgaggaacctgttaagacggctccgggaaaaaagaggccggtagagcactctcctgtggagccagactcctcctcgggaaccggaaaggcgggccagcagcctgcaagaaaaagattgaattttggtcagactggagacgcagactcagtacctgacccccagcctctcggacagccaccagcagccccctctggtctgggaactaatacgatggctacaggcagtggcgcaccaatggcagacaataacgagggcgccgacggagtgggtaattcctcgggaaattggcattgcgattccacatggatgggcgacagagtcatcaccaccagcacccgaacctgggccctgcccacctacaacaaccacctctacaaacaaatttccagccaatcaggagcctcgaacgacaatcactactttggctacagcaccccttgggggtattttgacttcaacagattccactgccacttttcaccacgtgactggcaaagactcatcaacaacaactggggattccgacccaagagactcaacttcaagctctttaacattcaagtcaaagaggtcacgcagaatgacggtacgacgacgattgccaataaccttaccagcacggttcaggtgtttactgactcggagtaccagctcccgtacgtcctcggctcggcgcatcaaggatgcctcccgccgttcccagcagacgtcttcatggtgccacagtatggatacctcaccctgaacaacgggagtcaggcagtaggacgctcttcattttactgcctggagtactttccttctcagatgctgcgtaccggaaacaactttaccttcagctacacttttgaggacgttcctttccacagcagctacgctcacagccagagtctggaccgtctcatgaatcctctcatcgaccagtacctgtattacttgagcagagcaaacactccaagtggaaccaccacgcagtcaaggcttcagttttctcaggccggagcgagtgacattcgggaccagtctaggaactggcttcctggaccctgttaccgccagcagcgagtatcaaagacatctgcggataacaacaacagtgaatactcgtggactggagctaccaagtaccacctcaatggcagagactctctggtgaatccgggcccggccatggcaagccacaaggacgatgaagaaaagttttttcctcagagcggggttctcatctttgggaagcaaggctcagagaaaacaaatgtggacattgaaaaggtcatgattacagacgaagaggaaatcaggacaaccaatcccgtggctacggagcagtatggttctgtatctaccaacctccagagaggcaacagacaagcagctaccgcagatgtcaacacacaaggcgttcttccaggcatggtctggcaggacagagatgtgtaccttcaggggcccatctgggcaaagattccacacacggacggacattttcacccctctcccctcatgggtggattcggacttaaacaccctcctccacagattctcatcaagaacaccccggtacctgcgaatccttcgaccaccttcagtgcggcaaagtttgcttccttcatcacacagtactccacgggacaggtcagcgtggagatcgagtgggagctgcagaaggaaaacagcaaacgctggaatcccgaaattcagtacacttccaactacaacaagtctgttaatgtggactttactgtggacactaatggcgtgtattcagagcctcgccccattggcaccagatacctgactcgtaatctgtaa

SEQ ID NO: 4337 - DNA, 2208 bp, Artificial Sequence
  Description of Artificial Sequence: Synthetic polynucleotide
atggctgccgatggttatcttccagattggctcgaggacactctctctgaaggaataagacagtggtggaagctcaaacctggcccaccaccaccaaagcccgcagagcggcataaggacgacagcaggggtcttgtgcttcctgggtacaagtacctcggacccttcaacggactcgacaagggagagccggtcaacgaggcagacgccgcggccctcgagcacgacaaagcctacgaccggcagctcgacagcggagacaacccgtacctcaagtacaaccacgccgacgcggagtttcaggagcgccttaaagaagatacgtcttttgggggcaacctcggacgagcagtcttccaggcgaaaaagagggttcttgaacctctgggcctggttgaggaacctgttaagacggctccgggaaaaaagaggccggtagagcactctcctgtggagccagactcctcctcgggaaccggaaaggcgggccagcagcctgcaagaaaaagattgaattttggtcagactggagacgcagactcagtacctgacccccagcctctcggacagccaccagcagccccctctggtctgggaactaatacgatggctacaggcagtggcgcaccaatggcagacaataacgagggcgccgacggagtgggtaattcctcgggaaattggcattgcgattccacatggatgggcgacagagtcatcaccaccagcacccgaacccgggccctgcccacctacaacaaccacctctacaaacaaatttccagccaatcaggagcctcgaacgacaatcactactttggctacagcaccccttgggggtattttgacttcaacagattccactgccacttttcaccacgtgactggcaaagactcatcaacaacaactggggattccgacccaagagactcaacttcaagctctttaacattcaagtcaaagaggtcacgcagaatgacggtacgacgacgattgccaataaccttaccagcacggttcaggtgtttactgactcggagtaccagctcccgtacgtcctcggctcggcgcatcaaggatgcctcccgccgttcccagcagacgtcttcatggtgccacagtatggatacctcaccctgaacaacgggagtcaggcagtaggacgctcttcattttactgcctggagtactttccttctcagatgctgcgtaccggaaacaactttaccttcagctacacttttgaggacgttcctttccacagcagctacgctcacagccagagtctggaccgtctcatgaatcctctcatcgaccagtacctgtattacttgagcagaacaaacactccaagtggaaccaccacgcagtcaaggcttcagttttctcaggccggagcgagtgacattcgggaccagtctaggaactggcttcctggaccctgttaccgccagcagcgagtatcaaagacatctgcggataacaacaacagtgaatactcgtggactggagctaccaagtaccacctcaatggcagagactctctggtgaatccgggcccggccatggcaagccacaaggacgatgaagaaaagttttttcctcagagcggggttctcatctttgggaagcaaggctcagagaaaacaaatgtggacattgaaaaggtcatgattacagacgaagaggaaatcaggacaaccaatcccgtggctacggagcagtatggttctgtatctaccaacctccagagaggcaacagacaagcagctaccgcagatgtcaacacacaaggcgttcttccaggcatggtctggcaggacagagatgtgtaccttcaggggcccatctgggcaaagattccacacacggacggacattttcacccctctcccctcatgggtggattcggacttaaacaccctcctccacagattctcatcaagaacaccccggtacctgcgaatccttcgaccaccttcagtgcggcaaagtttgcttccttcatcacacagtactccacgggacaggtcagcgtggagatcgagtgggagctgcagaaggaaaacagcaaacgctggaatcccgaaattcagtacacttccaactacaacaagtctgttaatgtggactttactgtggacactaatggcgtgtattcagagcctcgccccattggcaccagatacctgactcgtaatctgtaa

SEQ ID NO: 4338 - DNA, 2208 bp, Artificial Sequence
  Description of Artificial Sequence: Synthetic polynucleotide
atggctgccgatggttatcttccagattggctcgaggacactctctctgaaggaataagacagtggtggaagctcaaacctggcccaccaccaccaaagcccgcagagcggcataaggacgacagcaggggtcttgtgcttcctgggtacaagtacctcggacccttcaacggactcgacaagggagagccggtcaacgaggcagacgccgcggccctcgagcacgacaaagcctacgaccggcagctcgacagcggagacaacccgtacctcaagtacaaccacgccgacgcggagtttcaggagcgccttaaagaagatacgtcttttgggggcaacctcggacgagcagtcttccaggcgaaaaagagggttcttgaacctctgggcctggttgaggaacctgttaagacggctccgggaaaaaagaggccggtagagcactctcctgtggagccagactcctcctcgggaaccggaaaggcgggccagcagcctgcaagaaaaagattgaattttggtcagactggagacgcagactcagtacctgacccccagcctctcggacagccaccagcagccccctctggtctgggaactaatacgatggctacaggcagtggcgcaccaatggcagacaataacgagggcgccgacggagtgggtaattcctcgggaaattggcattgcgattccacatggatgggcgacagagtcatcaccaccagcacccgaacctgggccctgcccacctacaacagccacctctacaaacaaatttccagccaatcaggagcctcgaacgacaatcactactttggctacagcaccccttgggggtattttgacttcaacagattccactgccacttttcaccacgtgactggcaaagactcatcaacaacaactggggattccgacccaagagactcaacttcaagctctttaacattcaagtcaaagaggtcacgcagaatgacggtacgacgacgattgccaataaccttaccagcacggttcaggtgtttactgactcggagtaccagctcccgtacgtcctcggctcggcgcatcaaggatgcctcccgccgttcccagcagacgtcttcatggtgccacagtatggatacctcaccctgaacaacgggagtcaggcagtaggacgctcttcattttactgcctggagtactttccttctcagatgctgcgtaccggaaacaactttaccttcagctacacttttgaggacgttcctttccacagcagctacgctcacagccagagtctggaccgtctcatgaatcctctcatcgaccagtacctgtattacttgagcagaacaaacactccaagtggaaccaccacgcagtcaaggcttcagttttctcaggccggagcgagtgacattcgggaccagtctaggaactggcttcctggaccctgttaccgccagcagcgagtatcaaagacatctgcggataacaacaacagtgaatactcgtggactggagctaccaagtaccacctcaatggcagagactctctggtgaatccgggcccggccatggcaagccacaaggacgatgaagaaaagttttttcctcagagcggggttctcatctttgggaagcaaggctcagagaaaacaaatgtggacattgaaaaggtcatgattacagacgaagaggaaatcaggacaaccaatcccgtggctacggagcagtatggttctgtatctaccaacctccagagaggcaacagacaagcagctaccgcagatgtcaacacacaaggcgttcttccaggcatggtctggcaggacagagatgtgtaccttcaggggcccatctgggcaaagattccacacacggacggacattttcacccctctcccctcatgggtggattcggacttaaacaccctcctccacagattctcatcaagaacaccccggtacctgcgaatccttcgaccaccttcagtgcggcaaagtttgcttccttcatcacacagtactccacgggacaggtcagcgtggagatcgagtgggagctgcagaaggaaaacagcaaacgctggaatcccgaaattcagtacacttccaactacaacaagtctgttaatgtggactttactgtggacactaatggcgtgtattcagagcctcgccccattggcaccagatacctgactcgtaatctgtaa

SEQ ID NO: 4339 - DNA, 2208 bp, Artificial Sequence
  Description of Artificial Sequence: Synthetic polynucleotide
atggctgccgatggttatcttccagattggctcgaggacactctctctgaaggaataagacagtggtggaagctcaaacctggcccaccaccaccaaagcccgcagagcggcataaggacgacagcaggggtcttgtgcttcctgggtacaagtacctcggacccttcaacggactcgacaagggagagccggtcaacgaggcagacgccgcggccctcgagcacgacaaagcctacgaccggcagctcgacagcggagacaacccgtacctcaagtacaaccacgccgacgcggagtttcaggagcgccttaaagaagatacgtcttttgggggcaacctcggacgagcagtcttccaggcgaaaaagagggttcttgaacctctgggcctggttgaggaacctgttaagacggctccgggaaaaaagaggccggtagagcactctcctgtggagccagactcctcctcgggaaccggaaaggcgggccagcagcctgcaagaaaaagattgaattttggtcagactggagacgcagactcagtacctgacccccagcctctcggacagccaccagcagccccctctggtctgggaactaatacgatggctacaggcagtggcgcaccaatggcagacaataacgagggcgccgacggagtgggtaattcctcgggaaattggcattgcgattccacatggatgggcgacagagtcatcaccaccagcacccgaacctgggccctgcccacctacaacaaccacctctacaaacaaatttccagccaatcaggagcctcgaacgacaatcactactttggctacagcaccccttgggggtattttgacttcaacagattccactgccacttttcaccacgtgactggcaaagactcatcaacaacaactggggattccgacccaagagactcaacttcaagctctttaacattcaagtcaaagaggtcacgcagaatgacggtacgacgacgattgccaataaccttaccagcacggttcaggtgtttactgactcggagtaccagctcccgtacgtcctcggctcggcgcatcaaggatgcctcccgccgttcccagcagacgtcttcatggtgccacagtatggatacctcaccctgaacaacgggagtcaggcagtaggacgctcttcattttactgcctggagtactttccttctcagatgctgcgtaccggaaacaactttaccttcagctacacttttgaggacgttcctttccacagcagctacgctcacagccagagtctggaccgtctcatgaatcctctcatcgaccagtacctgtattacttgagcagaacaaacactccaagtggaaccaccacgcagtcaaggcttcagttttctcaggccggagcgagtgacattcgggaccagtctaggaactggcttcctggaccctgttaccgccagcagcgagtatcaaagacatctgcggataacaacaacagtgaatactcgtggactggagctaccaagtaccacctcaatggcagagactctctggtgaatccgggcccggccatggcaagccacaaggacgatgaagaaaagttttttcctcagagcggggttctcatctttgggaagcaaggctcagagaaaacaaatgtggacattgaaaaggtcatgattacagacgaagaggaaatcaggacaaccaatcccgtggctacggagcagtatggttctgtatctaccaacctccagagaggcaacagacaagcagctaccgcagatgtcaacacacaaggcgttcttccaggcatggtctggcaggacagagatgtgtaccttcaggggcccatctgggcaaagattccacacacggacggacattttcacccctctcccctcatgggtggattcggacttaaacgccctcctccacagattctcatcaagaacaccccggtacctgcgaatccttcgaccaccttcagtgcggcaaagtttgcttccttcatcacacagtactccacgggacaggtcagcgtggagatcgagtgggagctgcagaaggaaaacagcaaacgctggaatcccgaaattcagtacacttccaactacaacaagtctgttaatgtggactttactgtggacactaatggcgtgtattcagagcctcgccccattggcaccagatacctgactcgtaatctgtaa

SEQ ID NO: 4340 - DNA, 2208 bp, Artificial Sequence
  Description of Artificial Sequence: Synthetic polynucleotide
atggctgccgatggttatcttccagattggctcgaggacactctctctgaaggaataagacagtggtggaagctcaaacctggcccaccaccaccaaagcccgcagagcggcataaggacgacagcaggggtcttgtgcttcctgggtacaagtacctcggacccttcaacggactcgacaagggagagccggtcaacgaggcagacgccgcggccctcgagcacgacaaagcctacgaccggcagctcgacagcggagacaacccgtacctcaagtacaaccacgccgacgcggagtttcaggagcgccttaaagaagatacgtcttttgggggcaacctcggacgagcagtcttccaggcgaaaaagagggttcttgaacctctgggcctggttgaggaacctgttaagacggctccgggaaaaaagaggccggtagagcactctcctgtggagccagactcctcctcgggaaccggaaaggcgggccagcagcctgcaagaaaaagattgaattttggtcagactggagacgcagactcagtacctgacccccagcctctcggacagccaccagcagccccctctggtctgggaactaatacgatggctacaggcagtggcgcaccaatggcagacaataacgagggcgccgacggagtgggtaattcctcgggaaattggcattgcgattccacatggatgggcgacagagtcatcaccaccagcacccgaacctgggccctgcccacctacaacaaccacctctacaaacaaatttccagccaatcaggagcctcgaacgacaatcactactttggctacagcaccccttgggggtattttgacttcaacagattccactgccacttttcaccacgtgactggcaaagactcatcaacaacaactggggattccgacccaagagactcaacttcaagctctttaacattcaagtcaaagaggtcacgcagaatgacggtacgacgacgattgccaataaccttaccagcacggttcaggtgtttactgactcggagtaccggctcccgtacgtcctcggctcggcgcatcaaggatgcctcccgccgttcccagcagacgtcttcatggtgccacagtatggatacctcaccctgaacaacgggagtcaggcagtaggacgctcttcattttactgcctggagtactttccttctcagatgctgcgtaccggaaacaactttaccttcagctacacttttgaggacgttcctttccacagcagctacgctcacagccagagtctggaccgtctcatgaatcctctcatcgaccagtacctgtattacttgagcagaacaaacactccaagtggaaccaccacgcagtcaaggcttcagttttctcaggccggagcgagtgacattcgggaccagtctaggaactggcttcctggaccctgttaccgccagcagcgagtatcaaagacatctgcggataacaacaacagtgaatactcgtggactggagctaccaagtaccacctcaatggcagagactctctggtgaatccgggcccggccatggcaagccacaaggacgatgaagaaaagttttttcctcagagcggggttctcatctttgggaagcaaggctcagagaaaacaaatgtggacattgaaaaggtcatgattacagacgaagaggaaatcaggacaaccaatcccgtggctacggagcagtatggttctgtatctaccaacctccagagaggcaacagacaagcagctaccgcagatgtcaacacacaaggcgttcttccaggcatggtctggcaggacagagatgtgtaccttcaggggcccatctgggcaaagattccacacacggacggacattttcacccctctcccctcatgggtggattcggacttaaacaccctcctccacagattctcatcaagaacaccccggtacctgcgaatccttcgaccaccttcagtgcggcaaagtttgcttccttcatcacacagtactccacgggacaggtcagcgtggagatcgagtgggagctgcagaaggaaaacagcaaacgctggaatcccgaaattcagtacacttccaactacaacaagtctgttaatgtggactttactgtggacactaatggcgtgtattcagagcctcgccccattggcaccagatacctgactcgtaatctgtaa

SEQ ID NO: 4341 - DNA, 2208 bp, Artificial Sequence
  Description of Artificial Sequence: Synthetic polynucleotide
atggctgccgatggttatcttccagattggctcgaggacactctctctgaaggaataagacagtggtggaagctcaaacctggcccaccaccaccaaagcccgcagagcggcataaggacgacagcaggggtcttgtgcttcctgggtacaagtacctcggacccttcaacggactcgacaagggagagccggtcaacgaggcagacgccgcggccctcgagcacgacaaagcctacgaccggcagctcgacagcggagacaacccgtacctcaagtacaaccacgccgacgcggagtttcaggagcgccttaaagaagatacgtcttttgggggcaacctcggacgagcagtcttccaggcgaaaaagagggttcttgaacctctgggcctggttgaggaacctgttaagacggctccgggaaaaaagaggccggtagagcactctcctgtggagccagactcctcctcgggaaccggaaaggcgggccagcagcctgcaagaaaaagattgaattttggtcagactggagacgcagactcagtacctgacccccagcctctcggacagccaccagcagccccctctggtctgggaactaatacgatggctacaggcagtggcgcaccaatggcagacaataacgagggcgccgacggagtgggtaattcctcgggaaattggcattgcgattccacatggatgggcgacagagtcatcaccaccagcacccgaacctgggccctgcccacctacaacaaccacctctacaaacaaatttccagccaatcaggagcctcgaacgacaatcactactttggctacagcaccccttgggggtattttgacttcaacagattccactgccacttttcaccacgtgactggcaaagactcatcaacaacaactggggattccgacccaagagactcaacttcaagctctttaacattcaagtcaaagaggtcacgcagaatgacggtacgacgacgattgccaataaccttaccagcacggttcgggtgtttactgactcggagtaccagctcccgtacgtcctcggctcggcgcatcaaggatgcctcccgccgttcccagcagacgtcttcatggtgccacagtatggatacctcaccctgaacaacgggagtcaggcagtaggacgctcttcattttactgcctggagtactttccttctcagatgctgcgtaccggaaacaactttaccttcagctacacttttgaggacgttcctttccacagcagctacgctcacagccagagtctggaccgtctcatgaatcctctcatcgaccagtacctgtattacttgagcagaacaaacactccaagtggaaccaccacgcagtcaaggcttcagttttctcaggccggagcgagtgacattcgggaccagtctaggaactggcttcctggaccctgttaccgccagcagcgagtatcaaagacatctgcggataacaacaacagtgaatactcgtggactggagctaccaagtaccacctcaatggcagagactctctggtgaatccgggcccggccatggcaagccacaaggacgatgaagaaaagttttttcctcagagcggggttctcatctttgggaagcaaggctcagagaaaacaaatgtggacattgaaaaggtcatgattacagacgaagaggaaatcaggacaaccaatcccgtggctacggagcagtatggttctgtatctaccaacctccagagaggcaacagacaagcagctaccgcagatgtcaacacacaaggcgttcttccaggcatggtctggcaggacagagatgtgtaccttcaggggcccatctgggcaaagattccacacacggacggacattttcacccctctcccctcatgggtggattcggacttaaacaccctcctccacagattctcatcaagaacaccccggtacctgcgaatccttcgaccaccttcagtgcggcaaagtttgcttccttcatcacacagtactccacgggacaggtcagcgtggagatcgagtgggagctgcagaaggaaaacagcaaacgctggaatcccgaaattcagtacacttccaactacaacaagtctgttaatgtggactttactgtggacactaatggcgtgtattcagagcctcgccccattggcaccagatacctgactcgtaatctgtaa

SEQ ID NO: 4342 - DNA, 2208 bp, Artificial Sequence
  Description of Artificial Sequence: Synthetic polynucleotide
atggctgccgatggttatcttccagattggctcgaggacactctctctgaaggaataagacagtggtggaagctcaaacctggcccaccaccaccaaagcccgcagagcggcatagggacgacagcaggggtcttgtgcttcctgggtacaagtacctcggacccttcaacggactcgacaagggagagccggtcaacgaggcagacgccgcggccctcgagcacgacaaagcctacgaccggcagctcgacagcggagacaacccgtacctcaagtacaaccacgccgacgcggagtttcaggagcgccttaaagaagatacgtcttttgggggcaacctcggacgagcagtcttccaggcgaaaaagagggttcttgaacctctgggcctggttgaggaacctgttaagacggctccgggaaaaaagaggccggtagagcactctcctgtggagccagactcctcctcgggaaccggaaaggcgggccagcagcctgcaagaaaaagattgaattttggtcagactggagacgcagactcagtacctgacccccagcctctcggacagccaccagcagccctctctggtctgggaactaatacgatggctacaggcagtggcgcaccaatggcagacaataacgagggcgccgacggagtgggtaattcctcgggaaattggcattgcgattccacatggatgggcgacagagtcatcaccaccagcacccgaacctgggccctgcccacctacaacaaccacctctacaaacaaatttccagccaatcaggagcctcgaacggcaatcactactttggctacagcaccccttgggggtattttgacttcaacagattccactgccacttttcaccacgtgactggcaaagactcatcaacaacaactggggattccgacccaagagactcaacttcaagctctttaacattcaagtcaaagaggtcacgcagaatgacggtacgacgacgattgccaataaccttaccagcacggttcaggtgtttactgactcggagtaccagctcccgtacgtcctcggctcggcgcatcaaggatgcctcccgccgttcccagcagacgtcttcatggtgccacagtatggatacctcaccctgaacaacgggagtcaggcagtaggacgctcttcattttactgcctggagtactttccttctcagatgctgcgtaccggaaacaactttaccttcagctacacttttgaggacgttcctttccacagcagctacgctcacagccagagtctggaccgtctcatgaatcctctcatcgaccagtacctgtattacttgagcagaacaaacactccaagtggaaccaccacgcagtcaaggcttcagttttctcaggccggagcgagtgacattcgggaccagtctaggaactggcttcctggaccctgttaccgccagcagcgagtatcaaagacatctgcggataacaacaacagtgaatactcgtggactggagctaccaagtaccacctcaatggcagagactctctggtgaatccgggcccggccatggcaagccacaaggacgatgaagaaaagttttttcctcagagcggggttctcatctttgggaagcaaggctcagagaaaacaaatgtggacattgaaaaggtcatgattacagacgaagaggaaatcaggacaaccaatcccgtggctacggagcagtatggttctgtatctaccaacctccagaggggcaacagacaagcagctaccgcagatgtcaacacacaaggcgttcttccaggcatggtctggcaggacagagatgtgtaccttcaggggcccatctgggcaaagattccacacacggacggacattttcacccctctcccctcatgggtggattcggacttaaacaccctcctccacagattctcatcaagaacaccccggtacctgcgaatccttcgaccaccttcagtgcggcaaagtttgcttccttcatcacacagtactccacgggacaggtcagcgtggagatcgagtgggagctgcagaaggaaaacagcaaacgctggaatcccgaaattcagtacacttccaactacaacaagtctgttaatgtggactttactgtggacactaatggcgtgtattcagagcctcgccccattggcaccagatacctgactcgtaatctgtaa

SEQ ID NO: 4343 - DNA, 2208 bp, Artificial Sequence
  Description of Artificial Sequence: Synthetic polynucleotide
atggctgccgatggttatcttccagattggctcgaggacactctctctgaaggaataagacagtggtggaagctcaaacctggcccaccaccaccaaagcccgcagagcggcatagggacgacagcaggggtcttgtgcttcctgggtacaagtacctcggacccttcaacggactcgacaagggagagccggtcaacgaggcagacgccgcggccctcgagcacgacaaagcctacgaccggcagctcgacagcggagacaacccgtacctcaagtacaaccacgccgacgcggagtttcaggagcgccttaaagaagatacgtcttttgggggcaacctcggacgagcagtcttccaggcgaaaaagagggttcttgaacctctgggcctggttggggaacctgttaagacggctccgggaaaaaagaggccggtagagcactctcctgtggagccagactcctcctcgggaaccggaaaggcgggccagcagcctgcaagaaaaagattgaattttggtcagactggagacgcagactcagtacctgacccccagcctctcggacagccaccagcagccccctctggtctgggaactaatacgatggctacaggcagtggcgcaccaatggcagacaataacgagggcgccgacggagtgggtaattcctcgggaaattggcattgcgattccacatggatgggcgacagagtcatcaccaccagcacccgaacctgggccctgcccacctacaacaaccacctctacaaacaaatttccagccaatcaggagcctcgaacggcaatcactactttggctacagcaccccttgggggtattttgacttcaacagattccactgccacttttcaccacgtgactggcaaagactcatcaacaacaactggggattccgacccaagagactcaacttcaagctctttaacattcaagtcaaagaggtcacgcagaatgacggtacgacgacgattgccaataaccttaccagcacggttcaggtgtttactgactcggagtaccagctcccgtacgtcctcggctcggcgcatcaaggatgcctcccgccgttcccagcagacgtcttcatggtgccacagtatggatacctcaccctgaacaacgggagtcaggcagtaggacgctcttcattttactgcctggagtactttccttctcagatgctgcgtaccggaaacaactttaccttcagctacacttttgaggacgttcctttccacagcagctacgctcacagccagagtctggaccgtctcatgaatcctctcatcgaccagtacctgtattacttgagcagaacaaacactccaagtggaaccaccacgcagtcaaggcttcagttttctcaggccggagcgagtgacattcgggaccagtctaggaactggcttcctggaccctgttaccgccagcagcgagtatcaaagacatctgcggataacaacaacagtgaatactcgtggactggagctaccaagtaccacctcaatggcagagactctctggtgaatccgggcccggccatggcaagccacaaggacgatgaagaaaagttttttcctcagagcggggttctcatctttgggaagcaaggctcagagaaaacaaatgtggacattgaaaaggtcatgattacagacgaagaggaaatcaggacaaccaatcccgtggctacggagcagtatggttctgtatctaccaacctccagaggggcaacagacaagcagctaccgcagatgtcaacacacaaggcgttcttccaggcatggtctggcaggacagagatgtgtaccttcaggggcccatctgggcaaagattccacacacggacggacattttcacccctctcccctcatgggtggattcggacttaaacaccctcctccacagattctcatcaagaacaccccggtacctgcgaatccttcgaccaccttcagtgcggcaaagtttgcttccttcatcacacagtactccacgggacaggtcagcgtggagatcgagtgggagctgcagaaggaaaacagcaaacgctggaatcccgaaattcagtacacttccaactacaacaagtctgttaatgtggactttactgtggacactaatggcgtgtattcagagcctcgccccattggcaccagatacctgactcgtaatctgtaa

SEQ ID NO: 4344 - DNA, 2208 bp, Artificial Sequence
  Description of Artificial Sequence: Synthetic polynucleotide
atggctgccgatggttatcttccagattggctcgaggacactctctctgaaggaataagacagtggtggaagctcaaacctggcccaccaccaccaaagcccgcagagcggcatagggacgacagcaggggtcttgtgcttcctgggtacaagtacctcggacccttcaacggactcgacaagggagagccggtcaacgaggcagacgccgcggccctcgagcacgacaaagcctacgaccggcagctcgacagcggagacaacccgtacctcaagtacaaccacgccgacgcggagtttcaggagcgccttaaagaagatacgtcttttgggggcaacctcggacgagcagtcttccaggcgaaaaagagggttcttgaacctctgggcctggttgaggaacctgttaagacggctccgggaaaaaagaggccggtagagcactctcctgtggagccagactcctcctcgggaaccggaaaggcgggccagcagcctgcaagaaaaagattgaattttggtcagactggagacgcagactcagtacctgacccccagcctctcggacagccaccagcagccccctctggtctgggaactaatacgatggctacaggcagtggcgcaccaatggcagacaataacgagggcgccgacggagtgggtaattcctcgggaaattggcattacgattccgcatggatgggcgacagagtcatcaccaccagcacccgaacctgggccctgcccacctacaacaaccacctctacaaacaaatttccagccaatcaggagcctcgaacggcaatcactactttggctacagcaccccttgggggtattttgacttcaacagattccactgccacttttcaccacgtgactggcaaagactcatcaacaacaactggggattccgacccaagagactcaacttcaagctctttaacattcaagtcaaagaggtcacgcagaatgacggtacgacgacgattgccaataaccttaccagcacggttcaggtgtttactgactcggagtaccagctcccgtacgtcctcggctcggcgcatcaaggatgcctcccgccgttcccagcagacgtcttcatggtgccacagtatggatacctcaccctgaacaacgggagtcaggcagtaggacgctcttcattttactgcctggagtactttccttctcagatgctgcgtaccggaaacaactttaccttcagctacacttttgaggacgttcctttccacagcagctacgctcacagccagagtctggaccgtctcatgaatcctctcatcgaccagtacctgtattacttgagcagaacaaacactccaagtggaaccaccacgcagtcaaggcttcagttttctcaggccggagcgagtgacattcgggaccagtctaggaactggcttcctggaccctgttaccgccagcagcgagtatcaaagacatctgcggataacaacaacagtgaatactcgtggactggagctaccaagtaccacctcaatggcagagactctctggtgaatccgggcccggccatggcaagccacaaggacgatgaagaaaagttttttcctcagagcggggttctcatctttgggaagcaaggctcagagaaaacaaatgtggacattgaaaaggtcatgattacagacgaagaggaaatcaggacaaccaatcccgtggctacggagcagtatggttctgtatctaccaacctccagaggggcaacagacaagcagctaccgcagatgtcaacacacaaggcgttcttccaggcatggtctggcaggacagagatgtgtaccttcaggggcccatctgggcaaagattccacacacggacggacattttcacccctctcccctcatgggtggattcggacttaaacaccctcctccacagattctcatcaagaacaccccggtacctgcgaatccttcgaccaccttcagtgcggcaaagtttgcttccttcatcacacagtactccacgggacaggtcagcgtggagatcgagtgggagctgcagaaggaaaacagcaaacgctggaatcccgaaattcagtacacttccaactacaacaagtctgttaatgtggactttactgtggacactaatggcgtgtattcagagcctcgccccattggcaccagatacctgactcgtaatctgtaa

SEQ ID NO: 4345 - DNA, 2208 bp, Artificial Sequence
  Description of Artificial Sequence: Synthetic polynucleotide
atggctgccgatggttatcttccagattggctcgaggacactctctctgaaggaataagacagtggtggaagctcaaacctggcccaccaccaccaaagcccgcagagcggcatagggacgacagcaggggtcttgtgcttcctgggtacaagtacctcggacccttcaacggactcgacaagggagagccggtcaacgaggcagacgccgcggccctcgagcacgacaaagcctacgaccggcagctcgacagcggagacaacccgtacctcaagtacaaccacgccgacgcggagtttcaggagcgccttaaagaagatacgtcttttgggggcaacctcggacgagcagtcttccaggcgaaaaagagggttcttgaacctctgggcctggttgaggaacctgttaagacggctccgggaaaaaagaggccggtagagcactctcctgtggagccagactcctcctcgggaaccggaaaggcgggccagcagcctgcaagaaaaagattgaattttggtcagactggagacgcagactcagtacctgacccccagcctctcggacagccaccagcagccccctctggtctgggaactaatacgatggctacaggcagtggcgcaccaatggcagacaataacgagggcgccgacggagtgggtaattcctcgggaaattggcattgcgattccacatggatgggcgacagagtcatcaccaccagcacccgaacctgggccctgcccacctacaacaaccacctctacaaacaaatttccagccaatcaggagcctcgaacggcaatcactactttggctacagcaccccttgggggtattttgacttcaacagattccactgccacttttcaccacgtgactggcaaagactcatcaacaacaactggggattccgacccaagagactcaacttcaagctctttaacattcaagtcaaagaggtcacgcagaatgacggtacgacgacgattgccaataaccttaccagcacggttcaggtgtttactgactcggagtaccagctcccgtacgtcctcggctcggcgcatcaaggatgcctcccgccgttcccagcagacgtcttcatggtgccacagtatggatacctcaccctgaacaacgggagtcaggcagtaggacgctcttcattttactgcctggagtactttccttctcagatgctgcgtaccggaaacaactttaccttcagctacacttttgaggacgttcctttccacagcagctacgctcacagccagagtctggaccgtctcatgaatcctctcatcgaccagtacctgtattacttgagcagaacaaacactccaagtggaaccaccacgcagtcaaggcttcagttttctcaggccggagcgagtgacattcgggaccagtctaggaactggcttcctggaccctgttaccgccagcagcgagtatcaaagacatctgcggataacaacaacagtgaatactcgtggactggagctaccaagtaccacctcaatggcagagactctctggtgaatccgggcccggccatggcaagccacaaggacgatgaagaaaagttttttcctcagagcggggttctcatctttgggaagcaaggctcagagaaaacaaatgtggacattgaaaaggtcatgattacagacgaagaggaaatcaggacaaccaatcccgtggctacggagcagtatggttctgtatctaccaacctccagaggggcaacagacaagcagctaccgcagatgtcaacacacaaggcgttcttccaggcatggtctggcaggacagagatgtgtaccttcaggggcccatctgggcaaagattccacacacggacggacattttcacccctctcccctcatgggtggattcggacttaaacaccctcctccacagattctcatcaagaacaccccggtacctgcgaatccttcgaccaccttcagtgcggcaaagtttgcttccttcatcgcacagtactccacgggacaggtcagcgtggagatcgagtgggagctgcagaaggaaaacagcaaacgctggaatcccgaaattcagtacacttccaactacaacaagtctgttaatgtggactttactgtggacactaatggcgtgtattcagagcctcgccccattggcaccagatacctgactcgtaatctgtaa

SEQ ID NO: 4346 - DNA, 2208 bp, Artificial Sequence
  Description of Artificial Sequence: Synthetic polynucleotide
atggctgccgatggttatcttccagattggctcgaggacactctctctgaaggaataagacagtggtggaagctcaaacctggcccaccaccaccaaagcccgcagagcggcatagggacgacagcaggggtcttgtgcttcctgggtacaagtacctcggacccttcaacggactcgacaagggagagccggtcaacgaggcagacgccgcggccctcgagcacgacaaagcctacgaccggcagctcgacagcggagacaacccgtacctcaagtacaaccacgccgacgcggagtttcaggagcgccttaaagaagatacgtcttttgggggcaacctcggacgagcagtcttccaggcgaaaaagagggttcttgaacctctgggcctggttgaggaacctgttaagacggctccgggaaaaaagaggccggtagagcactctcctgtggagccagactcctcctcgggaaccggaaaggcgggccagcagcctgcaagaaaaagattgaattttggtcagactggagacgcagactcagtacctgacccccagcctctcggacagccaccagcagccccctctggtctgggaactaatacgatggctacaggcagtggcgcaccaatggcagacaataacgagggcgccgacggagtgggtaattcctcgggaaattggcattgcgattccacatggatgggcgacagagtcatcaccaccagcacccgaacctgggccctgcccacctacaacaaccacctctacaaacaaatttccagccaatcaggagcctcgaacggcaatcactactttggctacagcaccccttgggggtattttgacttcaacagattccactgccacttttcaccacgtgactggcaaagactcatcaacaacaactggggattccgacccaagagactcaacttcaagctctttaacattcaagtcaaagaggtcacgcagaatgacggtacgacgacgattgccaataaccttaccagcacggttcaggtgtttactgactcggagtaccagctcccgtacgtcctcggctcggcgcatcaaggatgcctcccgccgttcccagcagacgtcttcatggtgccacagtatggatacctcaccctgaacaacgggagtcaggcagtaggacgctcttcattttactgcctggagtactttccttctcagatgctgcgtaccggaaacaactttaccttcagctacacttttgaggacgttcctttccacagcagctacgctcacagccagagtctggaccgtctcatgaatcctctcatcgaccagtacccgtattacttgagcagaacaaacactccaagtggaaccaccacgcagtcaaggcttcagttttctcaggccggagcgagtgacattcgggaccagtctaggaactggcttcctggaccctgttaccgccagcagcgagtatcaaagacatctgcggataacaacaacagtgaatactcgtggactggagctaccaagtaccacctcaatggcagagactctctggtgaatccgggcccggccatggcaagccacaaggacgatgaagaaaagttttttcctcagagcggggttctcatctttgggaagcaaggctcagagaaaacaaatgtggacattgaaaaggtcatgattacagacgaagaggaaatcaggacaaccaatcccgtggctacggagcagtatggttctgtatctaccaacctccagaggggcaacagacaagcagctaccgcagatgtcaacacacaaggcgttcttccaggcatggtctggcaggacagagatgtgtaccttcaggggcccatctgggcaaagattccacacacggacggacattttcacccctctcccctcatgggtggattcggacttaaacaccctcctccacagattctcatcaagaacaccccggtacctgcgaatccttcgaccaccttcagtgcggcaaagtttgcttccttcatcacacagtactccacgggacaggtcagcgtggagatcgagtgggagctgcagaaggaaaacagcaaacgctggaatcccgaaattcagtacacttccaactacaacaagtctgttaatgtggactttactgtggacactaatggcgtgtattcagagcctcgccccattggcaccagatacctgactcgtaatctgtaa

SEQ ID NO: 4347 - DNA, 2208 bp, Artificial Sequence
  Description of Artificial Sequence: Synthetic polynucleotide
atggctgccgatggttatcttccagattggctcgaggacactctctctgaaggaataagacagtggtggaagctcaaacctggcccaccaccaccaaagcccgcagagcggcatagggacgacagcaggggtcttgtgcttcctgggtacaagtacctcggacccttcaacggactcgacaagggagagccggtcaacgaggcagacgccgcggccctcgagcacgacaaagcctacgaccggcagctcgacagcggagacaacccgtacctcaagtacaaccacgccgacgcggagtttcaggagcgccttaaagaagatacgtcttttgggggcaacctcggacgagcagtcttccaggcgaaaaagagggttcttgaacctctgggcctggttgaggaacctgttaagacggctccgggaaaaaagaggccggtagagcactctcctgtggagccagactcctcctcgggaaccggaaaggcgggccagcagcctgcaagaaaaagattgaattttggtcagactggagacgcagactcagtacctgacccccagcctctcggacagccaccagcagccccctctggtctgggaactaatacgatggctacaggcagtggcgcaccaatggcagacaataacgagggcgccgacggagtgggtaattcctcgggaaattggcattgcgattccacatggatgggcgacagagtcatcaccaccagcacccgaacctgggccctgcccacctacaacaaccacctctacaaacaaatttccagccaatcaggagcctcgaacggcaatcactactttggctacagcaccccttgggggtattttgacttcaacagattccactgccacttttcaccacgtgaccggcaaagactcatcaacaacaactggggattccgacccaagagactcaacttcaagctctttaacattcaagtcaaagaggtcacgcagaatgacggtacgacgacgattgccaataaccttaccagcacggttcaggtgtttactgactcggagtaccagctcccgtacgtcctcggctcggcgcatcaaggatgcctcccgccgttcccagcagacgtcttcatggtgccacagtatggatacctcaccctgaacaacgggagtcaggcagtaggacgctcttcattttactgcctggagtactttccttctcagatgctgcgtaccggaaacaactttaccttcagctacacttttgaggacgttcctttccacagcagctacgctcacagccagagtctggaccgtctcatgaatcctctcatcgaccagtacctgtattacttgagcagaacaaacactccaagtggaaccaccacgcagtcaaggcttcagttttctcaggccggagcgagtgacattcgggaccagtctaggaactggcttcctggaccctgttaccgccagcagcgagtatcaaagacatctgcggataacaacaacagtgaatactcgtggactggagctaccaagtaccacctcaatggcagagactctctggtgaatccgggcccggccatggcaagccacaaggacgatgaagaaaagttttttcctcagagcggggttctcatctttgggaagcaaggctcagagaaaacaaatgtggacattgaaaaggtcatgattacagacgaagaggaaatcaggacaaccaatcccgtggctacggagcagtatggttctgtatctaccaacctccagaggggcaacagacaagcagctaccgcagatgtcaacacacaaggcgttcttccaggcatggtctggcaggacagagatgtgtaccttcaggggcccatctgggcaaagattccacacacggacggacattttcacccctctcccctcatgggtggattcggacttaaacaccctcctccacagattctcatcaagaacaccccggtacctgcgaatccttcgaccaccttcagtgcggcaaagtttgcttccttcatcacacagtactccacgggacaggtcagcgtggagatcgagtgggagctgcagaaggaaaacagcaaacgctggaatcccgaaattcagtacacttccaactacaacaagtctgttaatgtggactttactgtggacactaatggcgtgtattcagagcctcgccccattggcaccagatacctgactcgtaatctgtaa

SEQ ID NO: 4348 - DNA, 2208 bp, Artificial Sequence
  Description of Artificial Sequence: Synthetic polynucleotide
atggctgccgatggttatcttccagattggctcgaggacactctctctgaaggaataagacagtggtggaagctcaaacctggcccaccaccaccaaagcccgcagagcggcatagggacgacagcaggggtcttgtgcttcctgggtacaagtacctcggacccttcaacggactcgacaagggagagccggtcaacgaggcagacgccgcggccctcgagcacgacaaagcctacgaccggcagctcgacagcggagacaacccgtacctcaagtacaaccacgccgacgcggagtttcaggagcgccttaaagaagatacgtcttttgggggcaacctcggacgagcagtcttccaggcgaaaaagagggttcttgaacctctgggcctggttgaggaacctgttaagacggctccgggaaaaaagaggccggtagagcactctcctgtggagccagactcctcctcgggaaccggaaaggcgggccagcagcctgcaagaaaaagattgaattttggtcagactggagacgcagactcagtacctgacccccagcctctcggacagccaccagcagccccctctggtctgggaactaatacgatggctacaggcagtggcgcaccaatggcagacaataacgagggcgccgacggagtgggtaattcctcgggaaattggcattgcgattccacatggatgggcgacagagtcatcaccaccagcacccgaacctgggccctgcccacctacaacaaccacctctacaaacaaatttccagccaatcaggagcctcgaacggcaatcactactttggctacagcaccccttgggggtattttgacttcaacagattccactgccacttttcaccacgtgactggcaaagactcatcaacaacaactggggattccgacccaagagactcaacttcaagctctttaacattcaagtcaaagaggtcacgcagaatgacggtacgacgacgattgccaataaccttaccagcacggttcaggtgtttactgactcggagtaccagctcccgtacgtcctcggctcggcgcatcaaggatgcctcccgccgttcccagcagacgtcttcatggtgccacagtatggatacctcaccctgaacaacgggagtcaggcagtaggacgctcttcattttactgcctggagtactttccttctcagatgctgcgtaccggaaacaactttaccttcagctacacttttgaggacgttcctttccacagcagctacgctcacagccagagtctggaccgtctcatgaatcctctcatcgaccagtacctgtattacttgagcagaacaaacactccaagtggaaccaccacgcagtcaaggcttcagttttctcaggccggagcgagtgacattcgggaccagtctaggaactggcttcctggaccctgttaccgccagcagcgagtatcaaagacatctgcggataacaacaacagtgaatactcgtggactggagctaccaagtaccacctcaatggcagagactctctggtgaatccgggcccggccatggcaagccacaaggacgatgaagaaaagttttttcctcagagcggggttctcatctttgggaagcaaggctcagagaaaacaaatgtggacattgaaaaggtcatgattacagacgaagaggaaatcaggacaaccaatcccgtggctacggagcagtatggttctgtatctaccaacctccagaggggcaacagacaagcagctaccgcagatgtcaacacacaaggcgttcttccaggcatggtctggcaggacagagatgtgtaccttcaggggcccatctgggcaaagattccacacacggacggacattttcacccctctcccctcatgggtggattcggacttaaacaccctcctccacagattctcatcaagaacaccccggtacctgcgaatccttcgaccaccttcagtgcggcaaagtttgcttccttcatcacacagtactccacgggacaggtcagcgtggagatcgagtgggagctgcagaaggaaaacagcaaacgctggaatcccgaaattcagtacacttccaactacaacaagtctgttaatgtggaccttactgtggacactaatggcgtgtattcagagcctcgccccattggcaccagatacctgactcgtaatctgtaa

SEQ ID NO: 4349 - DNA, 2208 bp, Artificial Sequence
  Description of Artificial Sequence: Synthetic polynucleotide
atggctgccgatggttatcttccagattggctcgaggacactctctctgaaggaataagacagtggtggaagctcaaacctggcccaccaccaccaaagcccgcagagcggcatagggacgacagcaggggtcttgcgcttcctgggtacaagtacctcggacccttcaacggactcgacaagggagagccggtcaacgaggcagacgccgcggccctcgagcacgacaaagcctacgaccggcagctcgacagcggagacaacccgtacctcaagtacaaccacgccgacgcggagtttcaggagcgccttaaagaagatacgtcttttgggggcaacctcggacgagcagtcttccaggcgaaaaagagggttcttgaacctctgggcctggttgaggaacctgttaagacggctccgggaaaaaagaggccggtagagcactctcctgtggagccagactcctcctcgggaaccggaaaggcgggccagcagcctgcaagaaaaagattgaattttggtcagactggagacgcagactcagtacctgacccccagcctctcggacagccaccagcagccccctctggtctgggaactaatacgatggctacaggcagtggcgcaccaatggcagacaataacgagggcgccgacggagtgggtaattcctcgggaaattggcattgcgattccacatggatgggcgacagagtcatcaccaccagcacccgaacctgggccctgcccacctacaacaaccacctctacaaacaaatttccagccaatcaggagcctcgaacggcaatcactactttggctacagcaccccttgggggtattttgacttcaacagattccactgccacttttcaccacgtgactggcaaagactcatcaacaacaactggggattccgacccaagagactcaacttcaagctctttaacattcaagtcaaagaggtcacgcagaatgacggtacgacgacgattgccaataaccttaccagcacggttcaggtgtttactgactcggagtaccagctcccgtacgtcctcggctcggcgcatcaaggatgcctcccgccgttcccagcagacgtcttcatggtgccacagtatggatacctcaccctgaacaacgggagtcaggcagtaggacgctcttcattttactgcctggagtactttccttctcagatgctgcgtaccggaaacaactttaccttcagctacacttttgaggacgttcctttccacagcagctacgctcacagccagagtctggaccgtctcatgaatcctctcatcgaccagtacctgtattacttgagcagaacaaacactccaagtggaaccaccacgcagtcaaggcttcagttttctcaggccggagcgagtgacattcgggaccagtctaggaactggcttcctggaccctgttaccgccagcagcgagtatcaaagacatctgcggataacaacaacagtgaatactcgtggactggagctaccaagtaccacctcaatggcagagactctctggtgaatccgggcccggccatggcaagccacaaggacgatgaagaaaagttttttcctcagagcggggttctcatctttgggaagcaaggctcagagaaaacaaatgtggacattgaaaaggtcatgattacagacgaagaggaaatcaggacaaccaatcccgtggctacggagcagtatggttctgtatctaccaacctccagaggggcaacagacaagcagctaccgcagatgtcaacacacaaggcgttcttccaggcatggtctggcaggacagagatgtgtaccttcaggggcccatctgggcaaagattccacacacggacggacattttcacccctctcccctcatgggtggattcggacttaaacaccctcctccacagattctcatcaagaacaccccggtacctgcgaatccttcgaccaccttcagtgcggcaaagtttgcttccttcatcacacagtactccacgggacaggtcagcgtggagatcgagtgggagctgcagaaggaaaacagcaaacgctggaatcccgaaattcagtacacttccaactacaacaagtctgttaatgtggactttactgtggacactaatggcgtgtattcagagcctcgccccattggcaccagatacctgactcgtaatctgtaa

SEQ ID NO: 4350 - DNA, 2208 bp, Artificial Sequence
  Description of Artificial Sequence: Synthetic polynucleotide
atggctgccgatggttatcttccagattggctcgaggacactctctctgaaggaataagacagtggtggaagctcaaacctggcccaccaccaccaaagcccgcagagcggcatagggacgacagcaggggtcttgtgcttcctgggtacaagtacctcggacccttcaacggactcgacaagggagagccggtcaacgaggcagacgccgcggccctcgagcacgacaaagcctacgaccggcagctcgacagcggagacaacccgtacctcaagtacaaccacgccgacgcggagtttcaggagcgccttaaagaagatacgtcttttgggggcaacctcggacgagcagtcttccaggcgaaaaagagggttcttgaacctctgggcctggttgaggaacctgttaagacggctccgggaaaaaagaggccggtagagcactctcctgtggagccagactcctcctcgggaaccggaaaggcgggccagcagcctgcaagaaaaagattgaattttggtcagactggagacgcagactcagtacctgacccccagcctctcggacagccaccagcagccccctctggtctgggaactaatacgatggctacaggcagtggcgcaccaatggcagacaataacgagggcgccgacggagtgggtaattcctcgggaaattggcattgcgattccacatggatgggcgacagagtcatcaccaccagcacccgaacctgggccctgcccacctacaacaaccacctctacaaacaaatttccagccaatcaggagcctcgaacggcaatcactactttggctacagcaccccttgggggtattttgacttcaacagattccactgccacttttcaccacgtgactggcaaagactcatcaacaacaactggggattccgacccaagagactcaacttcaagctctttaacattcaagtcaaagaggtcacgcagaatgacggtacgacgacgattgccaataaccttaccagcacggttcaggtgtttactgactcggagtaccagctcccgtacgtcctcggctcggcgcatcaaggatgcctcccgccgttcccagcagacgtcttcatggtgccacagtatggatacctcaccctgaacaacgggagtcaggcagtaggacgctcttcattttactgcctggagtactttccttctcagatgctgcgtaccggaaacaactttaccttcagctacacttttgaggacgttcctttccacagcagctacgctcacagccagagtctggaccgtctcatgaatcctctcatcgaccagtacctgtattacttgagcagaacaaacactccaagtggaaccaccacgcagtcaaggcttcagttttctcaggccggagcgagtgacattcgggaccagtctaggaactggcttcctggaccctgttaccgccagcagcgagtatcaaagacatctgcggataacaacaacagtgaatactcgtggactggagctaccaagtaccacctcaatggcagagactctctggtgaatccgggcccggccatggcaagccacaaggacgatgaagaaaagttttttcctcagagcggggttctcatctttgggaagcaaggctcagagaaaacaaatgtggacattgaaaaggtcatgattacagacgaagaggaaatcaggacaaccaatcccgtggctacggagcagtatggttctgtatctaccaacctccagaggggcaacagacaagcagctaccgcagatgccaacacacaaggcgttcttccaggcatggtctggcaggacagagatgtgtaccttcaggggcccatctgggcaaagattccacacacggacggacattttcacccctctcccctcatgggtggattcggacttaaacaccctcctccacagattctcatcaagaacaccccggtacctgcgaatccttcgaccaccttcagtgcggcaaagtttgcttccttcatcacacagtactccacgggacaggtcagcgtggagatcgagtgggagctgcagaaggaaaacagcaaacgctggaatcccgaaattcagtacacttccaactacaacaagtctgttaatgtggactttactgtggacactaatggcgtgtattcagagcctcgccccattggcaccagatacctgactcgtaatctgtaa

SEQ ID NO: 4351 - DNA, 2208 bp, Artificial Sequence
  Description of Artificial Sequence: Synthetic polynucleotide
atggctgccgatggttatcttccagattggctcgaggacactctctctgaaggaataagacagtggtggaagctcaaacctggcccaccaccaccaaagcccgcagagcggcatagggacgacagcaggggtcttgtgcttcctgggtacaagtacctcggacccttcaacggactcgacaagggagagccggtcaacgaggcagacgccgcggccctcgagcacgacaaagcctacgaccggcagctcgacagcggagacaacccgtacctcaagtacaaccacgccgacgcggagtttcaggagcgccttaaagaagatacgtcttttgggggcaacctcggacgagcagtcttccaggcgaaaaagagggttcttgaacctctgggcctggttgaggaacctgttaagacggctccgggaaaaaagaggccggtagagcactctcctgtggagccagactcctcctcgggaaccggaaaggcgggccagcagcctgcaagaaaaagattgaattttggtcagactggagacgcagactcagtacctgacccccagcctctcggacagccaccagcagccccctctggtctgggaactaatacgatggctacaggcagtggcgcaccaatggcagacaataacgagggcgccgacggagtgggtaattcctcgggaaattggcattgcgattccacatggatgggcgacagagtcatcaccaccagcacccgaacctgggccctgcccacctacaacaaccacctctacaaacaaatttccagccaatcaggagcctcgaacggcaatcactactttggctacagcaccccttgggggtattttgacttcaacagattccactgccacttttcaccacgtgactggcaaagactcatcaacaacaactggggattccgacccaagagactcaacttcaagctctttaacattcaagtcaaagaggtcacgcagaatgacggtacgacgacgattgccaataaccttaccagcacggttcaggtgtttactgactcggagtaccagctcccgtacgtcctcggctcggcgcatcaaggatgcctcccgccgttcccagcagacgtcttcatggtgccacagtatggatacctcaccctgaacaacgggagtcaggcagtaggacgctcttcattttactgcctggagtactttccttctcagatgctgcgtaccggaaacaactttaccttcagctacacttttgaggacgttcctttccacagcagctacgctcacagccagagtctggaccgtctcatgaatcctctcatcgaccagtacctgtattacttgagcagaacaaacactccaagtggaaccaccacgcagtcaaggcttcagttttctcaggccggagcgagtgacattcgggaccagtctaggaactggcttcctggaccctgttaccgccagcagcgagtatcaaagacatctgcggataacaacaacagtgaatactcgtggactggagctaccaagtaccacctcaatggcagagactctctggtgaatccgggcccggccatggcaagccacaaggacgatgaagaaaagttttttcctcagagcggggttctcatctttgggaagcaaggctcagagaaaacaaatgtggacattgaaaaggtcatgattacagacgaaggggaaatcaggacaaccaatcccgtggctacggagcagtatggttctgtatctaccaacctccagaggggcaacagacaagcagctaccgcagatgtcaacacacaaggcgttcttccaggcatggtctggcaggacagagatgtgtaccttcaggggcccatctgggcaaagattccacacacggacggacattttcacccctctcccctcatgggtggattcggacttaaacaccctcctccacagattctcatcaagaacaccccggtacctgcgaatccttcgaccaccttcagtgcggcaaagtttgcttccttcatcacacagtactccacgggacaggtcagcgtggagatcgagtgggagctgcagaaggaaaacagcaaacgctggaatcccgaaattcagtacacttccaactacaacaagtctgttaatgtggactttactgtggacactaatggcgtgtattcagagcctcgccccattggcaccagatacctgactcgtaatctgtaa

SEQ ID NO: 4352 - DNA, 2208 bp, Artificial Sequence
  Description of Artificial Sequence: Synthetic polynucleotide
atggctgccgatggttatcttccagattggctcgaggacactctctctgaaggaataagacagtggtggaagctcaaacctggcccaccaccaccaaagcccgcagagcggcatagggacgacagcaggggtcttgtgcttcctgggtacaagtacctcggacccttcaacggactcgacaagggagagccggtcaacgaggcagacgccgcggccctcgagcacgacaaagcctacgaccggcagctcgacagcggagacaacccgtacctcaagtacaaccacgccgacgcggagtttcaggagcgccttaaagaagatacgtcttttgggggcaacctcggacgagcagtcttccaggcgaaaaagagggttcttgaacctctgggcctggttgaggaacctgttaagacggctccgggaaaaaagaggccggtagagcactctcctgtggagccagactcctcctcgggaaccggaaaggcgggccagcagcctgcaagaaaaagattgaattttggtcagactggagacgcagactcagtacctgacccccagcctctcggacagccaccagcagccccctctggtctgggaactaatacgatggctacaggcagtggcgcaccaatggcagacaataacgagggcgccgacggagtgggtaattcctcgggaaattggcattgcgattccacatggatgggcgacagagtcatcaccaccagcacccgaacctgggccctgcccacctacaacaaccacctctacaaacaaatttccagccaatcaggagcctcgaacggcaatcactactttggctacagcaccccttgggggtattttgacttcaacagattccactgccacttttcaccacgtgactggcaaagactcatcaacaacaactggggattccgacccaagagactcaacttcaagctctttaacattcaagtcaaagaggtcacgcagaatgacggtacgacgacgattgccaataaccttaccagcacggttcaggtgtttactgactcggagtaccagctcccgtacgtcctcggctcggcgcatcaaggatgcctcccgccgttcccagcagacgtcttcatggtgccacagtatggatacctcaccctgaacaacgggagtcaggcagtaggacgctcttcattttactgcctggagtactttccttctcagatgctgcgtaccggaaacaactttaccttcagctacacttttgaggacgttcctttccacagcagctacgctcacagccagagtctggaccgtctcatgaatcctctcatcgaccagtacctgtattacttgagcagaacaaacactccaagtggaaccaccacgcagtcaaggcttcagttttctcaggccggagcgagtgacattcgggaccagtctaggaactggcttcctggaccctgttaccgccagcagcgagtatcaaagacatctgcggataacaacaacagtgaatactcgtggactggagctaccaagtaccacctcaatggcagagactctctggtgaatccgggcccggccatggcaagccacaaggacgatgaagaaaagttttttcctcagagcggggttctcatctttgggaagcaaggctcagagaaaacaaatgtggacattgaaaaggtcatgattacagacgaagaggaaatcaggacaaccaatcccgtggctacggagcagtatggttctgtatctaccaacctccagaggggcaacagacaagcagctaccgcagatgtcaacacacaaggcgttcttccaggcatggtctggcaggacagagatgtgtaccttcaggggcccatctgggcaaagattccacacacggacggacattttcacccctctccccccatgggtggattcggacttaaacaccctcctccacagattctcatcaagaacaccccggtacctgcgaatccttcgaccaccttcagtgcggcaaagtttgcttccttcatcacacagtactccacgggacaggtcagcgtggagatcgagtgggagctgcagaaggaaaacagcaaacgctggaatcccgaaattcagtacacttccaactacaacaagtctgttaatgtggactttactgtggacactaatggcgtgtattcagagcctcgccccattggcaccagatacctgactcgtaatctgtaa

SEQ ID NO: 4353 - DNA, 2208 bp, Artificial Sequence
  Description of Artificial Sequence: Synthetic polynucleotide
atggctgccgatggttatcttccagattggctcgaggacactctctctgaaggaataagacagtggtggaagctcaaacctggcccaccaccaccaaagcccgcagagcggcatagggacgacagcaggggtcttgtgcttcctgggtacaagtacctcggacccttcaacggactcgacaagggagagccggtcaacgaggcagacgccgcggccctcgagcacgacaaagcctacgaccggcagctcgacagcggagacaacccgtacctcaagtacaaccacgccgacgcggagtttcaggagcgccttaaagaagatacgtcttttgggggcaacctcggacgagcagtcttccaggcgaaaaagagggttcttgaacctctgggcctggttgaggaacctgttaagacggctccgggaaaaaagaggccggtagagcactctcctgtggagccagactcctcctcgggaaccggaaaggcgggccagcagcctgcaagaaaaagattgaattttggtcagactggagacgcagactcagtacctgacccccagcctctcggacagccaccagcagccccctctggtctgggaactaatacgatggctacaggcagtggcgcaccaatggcagacaataacgagggcgccgacggagtgggtaattcctcgggaaattggcattgcgattccacatggatgggcgacagagtcatcaccaccagcacccgaacctgggccctgcccacctacaacaaccacctctacaaacaaatttccagccaatcaggagcctcgaacggcaatcactactttggctacagcaccccttgggggtattttgacttcaacagattccactgccacttttcaccacgtgactggcaaagactcatcaacaacaactggggattccgacccaagagactcaacttcaagctctttaacattcaagtcaaagaggtcacgcagaatgacggtacgacgacgattgccaataaccttaccagcacggttcaggtgtttactgactcggagtaccagctcccgtacgtcctcggctcggcgcatcaaggatgcctcccgccgttcccagcagacgtcttcatggtgccacagtatggatacctcaccctgaacaacgggagtcaggcagtaggacgctcttcattttactgcctggagtactttccttctcagatgctgcgtaccggaaacaactttaccttcagctacacttttgaggacgttcctttccacagcagctacgctcacagccagagtctggaccgtctcatgaatcctctcatcgaccagtacctgtattacttgagcagaacaaacactccaagtggaaccaccacgcagtcaaggcttcagttttctcaggccggagcgagtgacattcgggaccagtctaggaactggcttcctggaccctgttaccgccagcagcgagtatcaaagacatctgcggataacaacaacagtgaatactcgtggactggagctaccaagtaccacctcaatggcagagactctctggtgaatccgggcccggccatggcaagccacaaggacgatgaagaaaagttttttcctcagagcggggttctcatctttgggaagcaaggctcagagaaaacaaatgtggacattgaaaaggtcatgattacagacgaagaggaaatcaggacaaccaatcccgtggctacggagcagtatggttctgtatctaccaacctccagaggggcaacagacaagcagctaccgcagatgtcaacacacaaggcgttcttccaggcatggtctggcaggacagagatgtgtaccttcaggggcccatctgggcaaagattccacacacggacggacattttcacccctctcccctcatgggtggattcggacttaaacaccctcctccacagattctcatcaagaacaccccggtacctgcgaatccttcgaccaccttcagtgcggcaaagtttgcttccttcatcacacagtactccacgggacaggtcagcgtggagatcgagtgggagctgcagaaggaaaacagcaaacgctggaatcccgaaattcagtacacttccgactacaacaagtctgttaatgtggactttactgtggacactaatggcgtgtattcagagcctcgccccattggcaccagatacctgactcgtaatctgtaa

SEQ ID NO: 4354 - DNA, 2208 bp, Artificial Sequence
  Description of Artificial Sequence: Synthetic polynucleotide
atggctgccgatggttatcttccagattggctcgaggacactctctctgaaggaataagacagtggtggaagctcaaacctggcccaccaccaccaaagcccgcagagcggcatagggacgacagcaggggtcttgtgcttcctgggtacaagtacctcggacccttcaacggactcgacaagggagagccggtcaacgaggcagacgccgcggccctcgagcacgacaaagcctacgaccggcagctcgacagcggagacaacccgtacctcaagtacaaccacgccgacgcggagtttcaggagcgccttaaagaagatacgtcttttgggggcaacctcggacgagcagtcttccaggcgaaaaagagggttcttgaacctctgggcctggttgaggaacctgttaagacggctccgggaaaaaagaggccggtagagcactctcctgtggagccagactcctcctcgggaaccggaaaggcgggccagcagcctgcaagaaaaagattgaattttggtcagactggagacgcagactcagtacctgacccccagcctctcggacagccaccagcagccccctctggtctgggaactaatacgatggctacaggcagtggcgcaccaatggcagacaataacgagggcgccgacggagtgggtaattcctcgggaaattggcattgcgattccacatggatgggcgacagagtcatcaccaccagcacccgaacctgggccctgcccacctacaacaaccacctctacaaacaaatttccagccaatcaggagcctcgaacggcaatcactactttggctacagcaccccttgggggtattttgacttcaacagattccactgccacttttcaccacgtgactggcaaagactcatcaacaacaactggggattccgacccaagagactcaacttcaagctctttaacattcaagtcaaagaggtcacgcagaatggcggtacgacgacgattgccaataaccttaccagcacggttcaggtgtttactgactcggagtaccagctcccgtacgtcctcggctcggcgcatcaaggatgcctcccgccgttcccagcagacgtcttcatggtgccacagtatggatacctcaccctgaacaacgggagtcaggcagtaggacgctcttcattttactgcctggagtactttccttctcagatgctgcgtaccggaaacaactttaccttcagctacacttttgaggacgttcctttccacagcagctacgctcacagccagagtctggaccgtctcatgaatcctctcatcgaccagtacctgtattacttgagcagaacaaacactccaagtggaaccaccacgcagtcaaggcttcagttttctcaggccggagcgagtgacattcgggaccagtctaggaactggcttcctggaccctgttaccgccagcagcgagtatcaaagacatctgcggataacaacaacagtgaatactcgtggactggagctaccaagtaccacctcaatggcagagactctctggtgaatccgggcccggccatggcaagccacaaggacgatgaagaaaagttttttcctcagagcggggttctcatctttgggaagcaaggctcagagaaaacaaatgtggacattgaaaaggtcatgattacagacgaagaggaaatcaggacaaccaatcccgtggctacggagcagtatggttctgtatctaccaacctccagaggggcaacagacaagcagctaccgcagatgtcaacacacaaggcgttcttccaggcatggtctggcaggacagagatgtgtaccttcaggggcccatctgggcaaagattccacacacggacggacattttcacccctctcccctcatgggtggattcggacttaaacaccctcctccacagattctcatcaagaacaccccggtacctgcgaatccttcgaccaccttcagtgcggcaaagtttgcttccttcatcacacagtactccacgggacaggtcagcgtggagatcgagtgggagctgcagaaggaaaacagcaaacgctggaatcccgaaattcagtacacttccaactacaacaagtctgttaatgtggactttactgtggacactaatggcgtgtattcagagcctcgccccattggcaccagatacctgactcgtaatctgtaa

SEQ ID NO: 4355 - DNA, 2208 bp, Artificial Sequence
  Description of Artificial Sequence: Synthetic polynucleotide
atggctgccgatggttatcttccagattggctcgaggacactctctctgaaggaataagacagtggtggaagctcaaacctggcccaccaccaccaaagcccgcagagcggcatagggacgacagcaggggtcttgtgcttcctgggtacaagtacctcggacccttcaacggactcgacaagggagagccggtcaacgaggcagacgccgcggccctcgagcacgacaaagcctacgaccggcagctcgacagcggagacaacccgtacctcaagtacaaccacgccgacgcggagtttcaggagcgccttaaagaagatacgtcttttgggggcaacctcggacgagcagtcttccaggcgaaaaagagggttcttgaacctctgggcctggttgaggaacctgttaagacggctccgggaaaaaagaggccggtagagcactctcctgtggagccagactcctcctcgggaaccggaaaggcgggccagcagcctgcaagaaaaagattgaattttggtcagactggagacgcagactcagtacctgacccccagcctctcggacagccaccagcagccccctctggtctgggaactaatacgatggctacaggcagtggcgcaccaatggcagacaataacgagggcgccgacggagtgggtaattcctcgggaaattggcattgcgattccacatggatgggcgacagagtcatcaccaccagcacccgaacctgggccctgcccacctacaacaaccacctctacaaacaaatttccagccaatcaggagcctcgaacggcaatcactactttggctacagcaccccttgggggtattttgacttcaacagattccactgccacttttcaccacgtgactggcaaagactcatcaacaacaactggggattccgacccaagagactcaacttcaagctctttaacattcaagtcaaagaggtcacgcagaatgacggtacgacgacgattgccaataaccttaccagcacggttcaggtgtttactgactcggagtaccagctcccgtacgtcctcggctcggcgcatcaaggatgcctcccgccgttcccagcagacgtcttcatggtgccacagtatggatacctcaccctgaacaacgggagtcaggcagtaggacgctcttcattttactgcctggagtactttccttctcagatgctgcgtaccggaaacaactttaccttcagctacacttttgaggacgttcctttccacagcagctacgctcacagccagagtctggaccgtctcatgaatcctctcatcgaccagtacctgtattacttgagcagaacaaacactccaagtggaaccaccacgcagtcaaggcttcagttttctcaggccgtagcgagtgacgttcgggaccagtctaggaactggcttcctggaccctgttaccgccagcagcgagtatcaaagacatctgcggataacaacaacagtgaatactcgtggactggagctaccaagtaccacctcaatggcagagactctctggtgaatccgggcccggccatggcaagccacaaggacgatgaagaaaagttttttcctcagagcggggttctcatctttgggaagcaaggctcagagaaaacaaatgtggacattgaaaaggtcatgattacagacgaagaggaaatcaggacaaccaatcccgtggctacggagcagtatggttctgtatctaccaacctccagaggggcaacagacaagcagctaccgcagatgtcaacacacaaggcgttcttccaggcatggtctggcaggacagagatgtgtaccttcaggggcccatctgggcaaagattccacacacggacggacattttcacccctctcccctcatgggtggattcggacttaaacaccctcctccacagattctcatcaagaacaccccggtacctgcgaatccttcgaccaccttcagtgcggcaaagtttgcttccttcatcacacagtactccacgggacaggtcagcgtggagatcgagtgggagctgcagaaggaaaacagcaaacgctggaatcccgaaattcagtacacttccaactacaacaagtctgttaatgtggactttactgtggacactaatggcgtgtattcagagcctcgccccattggcaccagatacctgactcgtaatctgtaa

SEQ ID NO: 4356 - DNA, 2208 bp, Artificial Sequence
  Description of Artificial Sequence: Synthetic polynucleotide
atggctgccgatggttatcttccagattggctcgaggacactctctctgaaggaataagacagcggtggaagctcaaacctggcccaccaccaccaaagcccgcagagcggcatagggacgacagcaggggtcttgtgcttcctgggtacaagtacctcggacccttcaacggactcgacaagggagagccggtcaacgaggcagacgccgcggccctcgagcacgacaaagcctacgaccggcagctcgacagcggagacaacccgtacctcaagtacaaccacgccgacgcggagtttcaggagcgccttaaagaagatacgtcttttgggggcaacctcggacgagcagtcttccaggcgaaaaagagggttcttgaacctctgggcctggttgaggaacctgttaagacggctccgggaaaaaagaggccggtagagcactctcctgtggagccagactcctcctcgggaaccggaaaggcgggccagcagcctgcaagaaaaagattgaattttggtcagactggagacgcagactcagtacctgacccccagcctctcggacagccaccagcagccccctctggtctgggaactaatacgatggctacaggcagtggcgcaccaatggcagacaataacgagggcgccgacggagtgggtaattcctcgggaaattggcattgcgattccacatggatgggcgacagagtcatcaccaccagcacccgaacctgggccctgcccacctacaacaaccacctctacaaacaaatttccagccaatcaggagcctcgaacggcaatcactactttggctacagcaccccttgggggtattttgacttcaacagattccactgccacttttcaccacgtgactggcaaagactcatcaacaacaactggggattccgacccaagagactcaacttcaagctctttaacattcaagtcaaagaggtcacgcagaatgacggtacgacgacgattgccaataaccttaccagcacggttcaggtgtttactgactcggagtaccagctcccgtacgtcctcggctcggcgcatcaaggatgcctcccgccgttcccagcagacgtcttcatggtgccacagtatggatacctcaccctgaacaacgggagtcaggcagtaggacgctcttcattttactgcctggagtactttccttctcagatgctgcgtaccggaaacaactttaccttcagctacacttttgaggacgttcctttccacagcagctacgctcacagccagagtctggaccgtctcatgaatcctctcatcgaccagtacctgtattacttgagcagaacaaacactccaagtggaaccaccacgcagtcaaggcttcagttttctcaggccggagcgagtgacattcgggaccagtctaggaactggcttcctggaccctgttaccgccagcagcgagtatcaaagacatctgcggataacaacaacagtgaatactcgtggactggagctaccaagtaccacctcaatggcagagactctctggtgaatccgggcccggccatggcaagccacaaggacgatgaagaaaagttttttcctcagagcggggttctcatctttgggaagcaaggctcagagaaaacaaatgtggacattgaaaaggtcatgattacagacgaagaggaaatcaggacaaccaatcccgtggctacggagcagtatggttctgtatctaccaacctccagaggggcaacagacaagcagctaccgcagatgtcaacacacaaggcgttcttccaggcatggtctggcaggacagagatgtgtaccttcaggggcccatctgggcaaagattccacacacggacggacattttcacccctctcccctcatgggtggattcggacttaaacaccctcctccacagattctcatcaagaacaccccggtacctgcgaatccttcgaccaccttcagtgcggcaaagtttgcttccttcatcacacagtactccacgggacaggtcagcgtggagatcgagtgggagctgcagaaggaaaacagcaaacgctggaatcccgaaattcagtacacttccaactacaacaagtctgttaatgtggactttactgtggacactaatggcgtgtattcagagcctcgccccattggcaccagatacctgactcgtaatctgtaa

SEQ ID NO: 4357 - DNA, 2208 bp, Artificial Sequence
  Description of Artificial Sequence: Synthetic polynucleotide
atggctgccgatggttatcttccagattggctcgaggacactctctctgaaggaataagacagtggtggaagctcaaacctggcccaccaccaccaaagcccgcagagcggcataaggacgacagcaggggtcttgtgcttcctgggtacaagtacctcggacccttcaacggactcgacaagggagagccggtcaacgaggcagacgccgcggccctcgagcacgacaaagcctacgaccggcagctcgacagcggagacaacccgtacctcaagtacaaccacgccgacgcggagtttcaggagcgccttaaagaagatacgtcttttgggggcaacctcggacgagcagtcttccaggcgaaaaagagggttcttgaacctctgggcctggttgaggaacctgttaagacggctccgggaaaaaagaggccggtagagcactctcctgtggagccagactcctcctcgggaaccggaaaggcgggccagcagcctgcaagaaaaagattgaattttggtcagactggagacgcagactcagtacctgacccccagcctctcggacagccaccagcagccccctctggtctgggaactaatacgatggctacaggcagtggcgcaccaatggcagacaataacgagggcgccgacggagtgggtaattcctcgggaaattggcattgcgattccacatggatgggcgacagagtcatcaccaccagcacccgaacctgggccctgcccacctacaacaaccacctctacaaacaaatttccagccaatcaggagcctcgaacgacaatcactactttggctacagcaccccttgggggtattttgacttcaacagattccactgccacttttcaccacgtgactggcaaagactcatcaacaacaactggggattccgacccaagagactcaacttcaagctctttaacattcaagtcaaagaggtcacgcagaatgacggtacgacgacgattgccaataaccttaccagcacggttcaggtgtttactgactcggagtaccagctcccgtacgtcctcggctcggcgcatcaaggatgcctcccgccgttcccagcagacgtcttcatggtgccacagtatggatacctcaccctgaacaacgggagtcaggcagtaggacgctcttcattttactgcctggagtactttccttctcagatgctgcgtaccggaaacaactttaccttcagctacacttttgaggacgttcctttccacagcagctacgctcacagccagagtctggaccgtctcatgaatcctctcatcgaccagtacctgtattacttgagcagaacaaacactccaagtggaaccaccacgcagtcaaggcttcagttttctcaggccggagcgagtgacattcgggaccagtctaggaactggcttcctggaccctgttaccgccagcagcgagtatcaaagacatctgcggataacaacaacagtgaatactcgtggactggagctaccaagtaccacctcaatggcagagactctctggtgaatccgggcccggccatggcaagccacaaggacgatgaagaaaagttttttcctcagagcggggttctcatctttgggaagcaaggctcagagaaaacaaatgtggacattgaaaaggtcatgactacagacgaagaggaaatcaggacaaccaatcccgtggctacggagcagtatggttctgtatctaccaacctccagaggggcaacagacaagcagctaccgcagatgtcaacacacaaggcgttcttccaggcatggtctggcaggacagagatgtgtaccttcaggggcccatctgggcaaagattccacacacggacggacattttcacccctctcccctcatgggtggattcggacttaaacaccctcctccacagattctcatcaagaacaccccggtacctgcgaatccttcgaccaccttcagtgcggcaaagtttgcttccttcatcacacagtactccacgggacaggtcagcgtggagatcgagtgggagctgcagaaggaaaacagcaaacgctggaatcccgaaattcagtacacttccaactacaacaagtctgttaatgtggactttactgtggacactaatggcgtgtattcagagcctcgccccattggcaccagatacctgactcgtaatctgtaa

SEQ ID NO: 4358 - DNA, 2208 bp, Artificial Sequence
  Description of Artificial Sequence: Synthetic polynucleotide
atggctgccgatggttatcttccagattggctcgaggacactctctctgaaggaataagacagtggtggaagctcaaacctggcccaccaccaccaaagcccgcagagcggcataaggacgacagcaggggtcttgtgcttcctgggtacaagtacctcggacccttcaacggactcgacaagggagagccggtcaacgaggcagacgccgcggccctcgagcacgacaaagcctacgaccggcagctcgacagcggagacaacccgtacctcaagtacaaccacgccgacgcggagtttcaggagcgccttaaagaagatacgtcttttgggggcaacctcggacgagcagtcttccaggcgaaaaagagggttcttgaacctccgggcctggttgaggaacctgttaagacggctccgggaaaaaagaggccggtagagcactctcctgtggagccagactcctcctcgggaaccggaaaggcgggccagcagcctgcaagaaaaagattgaattttggtcagactggagacgcagactcagtacctgacccccagcctctcggacagccaccagcagccccctctggtctgggaactaatacgatggctacaggcagtggcgcaccaatggcagacaataacgagggcgccgacggagtgggtaattcctcgggaaattggcattgcgattccacatggatgggcgacagagtcatcaccaccagcacccgaacctgggccctgcccacctacaacaaccacctctacaaacaaatttccagccaatcaggagcctcgaacgacaatcactactttggctacagcaccccttgggggtattttgacttcaacagattccactgccacttttcaccacgtgactggcaaagactcatcaacaacaactggggattccgacccaagagactcaacttcaagctctttaacattcaagtcaaagaggtcacgcagaatgacggtacgacgacgattgccaataaccttaccagcacggttcaggtgtttactgactcggagtaccagctcccgtacgtcctcggctcggcgcatcaaggatgcctcccgccgttcccagcagacgtcttcatggtgccacagtatggatacctcaccctgaacaacgggagtcaggcagtaggacgctcttcattttactgcctggagtactttccttctcagatgctgcgtaccggaaacaactttaccttcagctacacttttgaggacgttcctttccacagcagctacgctcacagccagagtctggaccgtctcatgaatcctctcatcgaccagtacctgtattacttgagcagaacaaacactccaagtggaaccaccacgcagtcaaggcttcagttttctcaggccggagcgagtgacattcgggaccagtctaggaactggcttcctggaccctgttaccgccagcagcgagtatcaaagacatctgcggataacaacaacagtgaatactcgtggactggagctaccaagtaccacctcaatggcagagactctctggtgaatccgggcccggccatggcaagccacaaggacgatgaagaaaagttttttcctcagagcggggttctcatctttgggaagcaaggctcagagaaaacaaatgtggacattgaaaaggtcatgactacagacgaagaggaaatcaggacaaccaatcccgtggctacggagcagtatggttctgtatctaccaacctccagagaggcaacagacaagcagctaccgcagatgtcaacacacaaggcgttcttccaggcatggtctggcaggacagagatgtgtaccttcaggggcccatctgggcaaagattccacacacggacggacattttcacccctctcccctcatgggtggattcggacttaaacaccctcctccacagattctcatcaagaacaccccggtacctgcgaatccttcgaccaccttcagtgcggcaaagtttgcttccttcatcacacagtactccacgggacaggtcagcgtggagatcgagtgggagctgcagaaggaaaacagcaaacgctggaatcccgaaattcagtacacttccaactacaacaagtctgttaatgtggactttactgtggacactaatggcgtgtattcagagcctcgccccattggcaccagatacctgactcgtaatctgtaa

SEQ ID NO: 4359 - DNA, 2208 bp, Artificial Sequence
  Description of Artificial Sequence: Synthetic polynucleotide
atggctgccgatggttatcttccagattggctcgaggacactctctctgaaggaataagacagtggtggaagctcaaacctggcccaccaccaccaaagcccgcagagcggcataaggacgacagcaggggtcttgtgcttcctgggtacaagtacctcggacccttcaacggactcgacaagggagagccggtcaacgaggcagacgccgcggccctcgagcacgacaaagcctacgaccggcagctcgacagcggagacaacccgtacctcaagtacaaccacgccgacgcggagtttcaggagcgccttaaagaagatacgtcttttgggggcaacctcggacgagcagtcttccaggcgaaaaagagggttcttgaacctctgggcctggttgaggaacctgttaagacggctccgggaaaaaagaggccggtagagcactctcctgtggagccagactcctcctcgggaaccggaaaggcgggccagcagcctgcaagaaaaagattgaattttggtcagactggagacgcagactcagtacctgacccccagcctctcggacagccaccagcagccccctctggtctgggaactaatacgatggctacaggcagtggcgcaccaatggcagacaataacgagggcgccgacggagtgggtaattcctcgggaaattggcattgcgattccacatggatgggcgacagagtcatcaccaccagcacccgaacctgggccctgcccacctacaacaaccacctctacaaacaaatttccagccaatcaggagcctcgaacgacaatcactactttggctacagcaccccttgggggtattttgacttcaacagattccactgccacttttcaccacgtgactggcaaagactcatcaacaacaactggggattccgacccaagagactcaacttcaagctctttaacattcaagtcaaagaggtcacgcagaatgacggtacgacgacgattgccaataaccttaccagcacggttcaggtgtttactgactcggagtaccagctcccgtacgtcctcggctcggcgcatcaaggatgcctcccgccgttcccagcagacgtcttcatggtgccacagtatggatacctcaccctgaacaacgggagtcaggcagtaggacgctcttcattttactgcctggagtactttccttctcagatgctgcgtaccggaaacaactttaccttcagctacacttttgaggacgttcctttccacagcagctacgctcacagccagagtctggaccgtctcatgaatcctctcatcgaccagtacctgtattacttgagcagaacaaacactccaagtggaaccaccacgcagtcaaggcttcagttttctcaggccggagcgagtgacattcgggaccagtctaggaactggcttcctggaccctgttaccgccagcagcgagtatcaaagacatctgcggataacaacaacagtgaatactcgtggactggagctaccaagtaccacctcaatggcagagactctctggtgaatccgggcccggccatggcaagccacaaggacgatgaagaaaagttttttcctcagagcggggttctcatctttgggaagcaaggctcagagaaaacaaatgtggacattgaaaaggtcatgactacagacgaagaggaaatcaggacaaccaatcccgtggctacggagcagtatggttctgtatctaccaacctccagagaggcaacagacaagcagctaccgcagatgtcaacacacaaggcgttcttccaggcatggtctggcaggacagagatgtgtaccttcaggggcccatctgggcaaagattccacacacggacggacattttcacccctctcccctcatgggtggattcggacttaaacaccctcctccacagattctcatcaagaacaccccggtacctgcgaatccttcgaccaccttcagtgcggcaaagtttgcttccttcatcacacagtactccacgggacaggtcagcgtggagatcgagtgggagctgcagaaggaaaacggcaaacgctggaatcccgaaattcagtacacttccaactacaacaagtctgttaatgtggactttactgtggacactaatggcgtgtattcagagcctcgccccattggcaccagatacctgactcgtaatctgtaa

SEQ ID NO: 4360 - DNA, 2208 bp, Artificial Sequence
  Description of Artificial Sequence: Synthetic polynucleotide
atggctgccgatggttatcttccagattggctcgaggacactctctctgaaggaataagacagtggtggaagctcaaacctggcccaccaccgccagagcccgcagagcggcacaaggacgacagtaggggtcttgtgcttcctgggtacaagtacctcggacccttcaacggactcgacaaaggagagccggtcaacgaggcagacgccgcggccctcgagcacgacaaggcctacgaccggcagctcgacagcggagacaacccgtacctcaagtacaaccacgccgacgcggagtttcaggagcgtcttaaagaagatacgtcttttgggggcaacctcggacgagcagtattccaggcgaaaaagagggttcttgaacctctgggcctggttgaggagcctgttaagacggctccgggaaaaaagaggccggtagagcactctcctgtggagccagactcctcctcgggaaccggaaaagcgggccagcagcctgcaagaaaaagattgaattttggtcagactggagacgcagactccgtacctgacccccagcctctcggacagccaccagcagcccccacaagtttgggatctactacaatggctacaggcagtggcgcaccaatggcagacaataacgagggtgccgatggagtgggtaattcctcaggaaattggcattgcgattcccaatggctgggcgacagagtcatcaccaccagcacccgaacctgggccctgcccacctacaacaaccacctctacaagcaaatctccagccaatcaggagcatcgaacgacaaccactactttggccacagcaccccttgggggtattttgacttcaacagattccactgtcacttctccccacgtgactggcaaagactcatcaacaacaactggggattccgacccaagagactcaacttcaagctctttaacattcaagtcaaagaggtcacgcagaatgacggtacgacgacgattgccaataaccttaccagcacggttcaggtgtttactgactcggagtaccagctcccgtacgtcctcggctcggcgcatcaaggatgcctcccgccgttcccagcagacgtcttcatggtcccacagtatggatacctcaccctgaacaacgggagtcaggcggtaggacgctcttccttttactgcctggagtactttccttctcagatgcttcgtaccggaaacaactttaccttcagctacacctttgaagacgtgcctttccacagtagctacgctcacagccagagtctggatcggctgatgaatcctcttatcgaccagtacctgtattatctaaacaaaacacaatcaaatagtggaactcttcagcagtctcggctactgtttagtcaagctggacccaccagcatgtctcttcaagctaaaaactggctgcctggaccttgctacagacaacagcgtctgtcaaagcaggcaaacgacaacaacaacagcaactttccctggactgcggctacaaagtatcatctaaatggccgggactcgttggttaatccaggaccagctatggccagccacaaagacgatgaagaaaagtttttccccatgcatggaaccctgatatttggtaaacaaggaacaaatgctaacgacgcggatttggacaatgtcatgattacagatgaagaagaaatccgcaccaccaatcccgtggctacggagcagtacgggactgtgtcaaataatttgcaaaactcaaatactggtccaactactggaactgtcaatcaccaaggagcgttacctggtatggtgtggcaggatcgagacgtgtacctgcagggacccatttgggccaagattcctcacaccgatggacactttcatccttctccactgatgggaggttttggactcaaacacccgcctcctcagatcatgatcaaaaacactcccgttccagccaatcctcctacaaacttcagttctgccaagtttgcttccttcatcacacagtattccacgggacaagtcagcgtggagattgagtgggagctgcagaaggagaacagcaaacgctggaaccccgagatccagtacacttccaactacaacaaatctgttaatgtggactttactgtggacactaatggcgtgtattcagagcctcgccccattggcaccagatacctgactcgtaatctgtaa

SEQ ID NO: 4361 - DNA, 2208 bp, Artificial Sequence
  Description of Artificial Sequence: Synthetic polynucleotide
atggctgccgatggttatcttccagattggctcgaggacactctctctgaaggaataagacagtggtggaagctcaaacctggcccaccaccgccaaagcccgcagagcggcacaaggacgacagtaggggtcttgtgcttcctgggtacaagtacctcggacccttcaacggactcgacaaaggagagccggtcaacgaggcagacgccgcggccctcgagcacgacaaggcctacgaccggcagctcgacagcggagacaacccgtacctcaagtacaaccacgccgacgcggagtttcaggagcgtcttaaagaagatacgtcttttgggggcaacctcggacgagcagtattccaggcgaaaaagagggttcttgaacctctgggcctggttgaggagcctgttaagacggctccgggaaaaaagaggccggtagagcactctcctgtggagccagactcctcctcgggaaccggaaaagcgggccagcagcctgcaagaaaaagattgaattttggtcagactggagacgcagactccgtacctgacccccagcctctcggacagccaccagcagcccccacaagtttgggatctactacaatggctacaggcagtggcgcaccaatggcagacaataacgagggtgccgatggagtgggtaattcctcaggaaattggcattgcgattcccaatggctgggcgacagagtcatcaccaccagcacccgaacctgggccctgcccacctacaacaaccacctctacaagcaaatctccagccaatcaggagcatcgaacgacaaccactactttggccacagcaccccttgggggtattttgacttcaacagattccactgtcacttctccccacgtgactggcaaagactcatcaacaacaactggggattccgacccaagagactcaacttcaagctctttaacattcaagtcaaagaggtcacgcagaatgacggtacgacgacgattgccaataaccttaccagcacggttcaggtgtttactgactcggagtaccagctcccgtacgtcctcggctcggcgcatcaaggatgcctcccgccgttcccagcagacgtcttcatggtctcacagtatggatacctcaccctgaacaacgggagtcaggcggtaggacgctcttccttttactgcctggagtactttccttctcagatgcttcgtaccggaaacaactttaccttcagctacacctttgaagacgtgcctttccacagtagctacgctcacagccagagtctggatcggctgatgaatcctcttatcgaccagtacctgtattatctaaacaaaacacaatcaaatagtggaactcttcagcagtctcggctactgtttagtcaagctggacccaccagcatgtctcttcaagctaaaaactggctgcctggaccttgctacagacaacagcgtctgtcaaagcaggcaaacgacaacaacaacagcaactttccctggactgcggctacaaagtatcatctaaatggccgggactcgttggttaatccaggaccagctatggccagccacaaagacgatgaagaaaagtttttccccatgcatggaaccctgatatttggtaaacaaggaacaaatgctaacgacgcggatttggacaatgtcatgattacagatgaagaagaaatccgcaccaccaatcccgtggctacggagcagtacgggactgtgtcaaataatttgcaaaactcaaatactggtccaactactggaactgtcaatcaccaaggagcgttacctggtatggtgtggcaggatcgagacgtgtacctgcagggacccatttgggccaagattcctcacaccgatggacactttcatccttctccactgatgggaggttttggactcaaacacccgcctcctcagatcatgatcaaaaacactcccgttccagccaatcctcctacaaacttcagttctgccaagtttgcttccttcatcacacagtattccacgggacaagtcagcgtggagattgagtgggagctgcagaaggagaacagcaaacgctggaaccccgagatccagtacacttccaactacaacaaatctgttaatgtggactttactgtggacactaatggcgtgtattcagagcctcgccccattggcaccagatacctgactcgtaatctgtaa

SEQ ID NO: 4362 - DNA, 2208 bp, Artificial Sequence
  Description of Artificial Sequence: Synthetic polynucleotide
atggctgccgatggttatcttccagattggctcgaggacactctctctgaaggaataagacagtggtggaagctcaaacctggcccaccaccgccaaagcccgcagagcggcacaaggacgacagtaggggtcttgtgcttcctgggtacaagtacctcggacccttcaacggactcgacaaaggagagccggtcaacgaggcagacgccgcggccctcgagcacgacaaggcctacgaccggcagctcgacagcggagacaacccgtacctcaagtacaaccacgccgacgcggagtttcaggagcgtcttaaagaagatacgtcttttgggggcaacctcggacgagcagtattccaggcgaaaaagagggttcttgaacctctgggcctggttgaggagcctgttaagacggctccgggaaaaaagaggccggtagagcactctcctgtggagccagactcctcctcgggaaccggaaaagcgggccagcagcctgcaagaaaaagattgaattttggtcagactggagacgcagactccgtacctgacccccagcctctcggacagccaccagcagcccccacaagtttgggatctactacaatggctacaggcagtggcgcaccaatggcagacaataacgagggtgccgatggagtgggtaattcctcaggaaattggcattgcgattcccaatggctgggcgacagagtcatcaccaccagcacccgaacctgggccctgcccacctacaacaaccacctctacaagcaaatctccagccaatcaggagcatcgaacgacaaccactactttggccacagcaccccttgggggtattttgacttcaacagattccactgtcacttctccccacgtgactggcaaagactcatcaacaacaactggggattccgacccaagagactcaacttcaagctctttaacattcaagtcaaagaggtcacgcagaatgacggtacgacgacgattgccaataaccttaccagcacggttcaggtgtttactgactcggagtaccagctcccgtacgtcctcggctcggcgcatcaaggatgcctcccgccgttcccagcagacgtcttcatggtctcacagtatggatacctcaccctgaacaacgggagtcaggcggtaggacgctcttccttttactgcctggagtactttccttctcagatgcttcgtaccggaaacaactttaccttcagctacacctttgaagacgtgcctttccacagtagctacgctcacagccagagtctggatcggctgatgaatcctcttatcgaccagtacctgtattatctaaacaaaacacaatcaaatagtggaactcttcagcagtctcggctactgtttagtcaagctggacccaccagcatgtctcttcaagctaaaaactggctgcctggaccttgctacagacaacagcgtctgtcaaagcaggcaaacgacaacaacaacagcaactttccctggactgcggctacaaagtatcatctaaatggccgggactcgttggttaatccaggaccagctatggccagccacaaagacgatgaagaaaagcttttccccatgcatggaaccctgatatttggtaaacaaggaacaaatgctaacgacgcggatttggacaatgtcatgattacagatgaagaagaaatccgcaccaccaatcccgtggctacggagcagtacgggactgtgtcaaataatttgcaaaactcaaatactggtccaactactggaactgtcaatcaccaaggagcgttacctggtatggtgtggcaggatcgagacgtgtacctgcagggacccatttgggccaagattcctcacaccgatggacactttcatccttctccactgatgggaggttttggactcaaacacccgcctcctcagatcatgatcaaaaacactcccgttccagccaatcctcctacaaacttcagttctgccaagtttgcttccttcatcacacagtattccacgggacaagtcagcgtggagattgagtgggagctgcagaaggagaacagcaaacgctggaaccccgagatccagtacacttccaactacaacaaatctgttaatgtggactttactgtggacactaatggcgtgtattcagagcctcgccccattggcaccagatacctgactcgtaatctgtaa

SEQ ID NO: 4363 - DNA, 2208 bp, Artificial Sequence
  Description of Artificial Sequence: Synthetic polynucleotide
atggctgccgatggttatcttccagattggctcgaggacactctctctgaaggaataagacagtggtggaagctcaaacctggcccaccaccgccaaagcccgcagagcggcacaaggacgacagtaggggtcttgtgcttcctgggtacaagtacctcggacccttcaacggactcgacaaaggagagccggtcaacgaggcagacgccgcggccctcgagcacgacaaggcctacgaccggcagctcgacagcggagacaacccgtacctcaagtacaaccacgccgacgcggagtttcaggagcgtcttaaagaagatacgtcttttgggggcaacctcggacgagcagtattccaggcgaaaaagagggttcttgaacctctgggcctggttgaggagcctgttaagacggctccgggaaaaaagaggccggtagagcactctcctgtggagccagactcctcctcgggaaccggaaaagcgggccagcagcctgcaagaaaaagattgaattttggtcagactggagacgcagactccgtacctgacccccagcctctcggacagccaccagcagcccccacaagtttgggatctactacaatggctacaggcagtggcgcaccaatggcagacaataacgagggtgccgatggagtgggtaattcctcaggaaattggcattgcgattcccaatggctgggcgacagagtcatcaccaccagcacccgaacctgggccctgcccacctacaacaaccacctctacaagcaaatctccagccaatcaggagcatcgaacgacaaccactactttggccacagcaccccttgggggtattttgacttcaacagattccactgtcacttctccccacgtgactggcaaagactcatcaacaacaactggggattccgacccaagagactcaacttcaagctctttaacattcaagtcaaagaggtcacgcagaatgacggtacgacgacgattgccaataaccttaccagcacggttcaggtgtttactgactcggagtaccagctcccgtacgtcctcggctcggcgcatcaaggatgcctcccgccgttcccagcagacgtcttcatggtcccacagtatggatacctcaccctgaacaacgggagtcaggcggtaggacgctcttccttttactgcctggagtactttccttctcagatgcttcgtaccggaaacaactttaccttcagctacacctttgaagacgtgcctttccacagtagctacgctcacagccagagtctggatcggctgatgaatcctcttatcgaccagtacctgtattatctaaacaaaacacaatcaaatagtggaactcttcagcagtctcggctactgtttagtcaagctggacccaccagcatgtctcttcaagctaaaaactggctgcctggaccttgctacagacaacagcgtctgtcaaagcaggcaaacgacaacaacaacagcaacttttcctggactgcggctacaaagtatcatctaaatggccgggactcgttggttaatccaggaccagctatggccagccacaaagacgatgaagaaaagtttttccccatgcatggaaccctgatatttggtaaacaaggaacaaatgctaacgacgcggatttggacaatgtcatgattacagatgaagaagaaatccgcaccaccaatcccgtggctacggagcagtacgggactgtgtcaaataatttgcaaaactcaaatactggtccaactactggaactgtcaatcaccaaggagcgttacctggtatggtgtggcaggatcgagacgtgtacctgcagggacccatttgggccaagattcctcacaccgatggacactttcatccttctccactgatgggaggttttggactcaaacacccgcctcctcagatcatgatcaaaaacactcccgttccagccaatcctcctacaaacttcagttctgccaagtttgcttccttcatcacacagtattccacgggacaagtcagcgtggagattgagtgggagctgcagaaggagaacagcaaacgctggaaccccgagatccagtacacttccaactacaacaaatctgttaatgtggactttactgtggacactaatggcgtgtattcagagcctcgccccattggcaccagatacctgactcgtaatctgtaa

SEQ ID NO: 4364 - DNA, 2208 bp, Artificial Sequence
  Description of Artificial Sequence: Synthetic polynucleotide
atggctgccgatggttatcttccagattggctcgaggacactctctctgaaggaataagacagtggtggaagctcaaacctggcccaccaccgccaaagcccgcagagcggcacaaggacgacagtaggggtcttgtgcttcctgggtacaagtacctcggacccttcaacggactcgacaaaggagagccggtcaacgaggcagacgccgcggccctcgagcacgacaaggcctacgaccggcagctcgacagcggagacaacccgtacctcaagtacaaccacgccgacgcggagtttcaggagcgtcttaaagaagatacgtcttttgggggcaacctcggacgagcagtattccaggcgaaaaagagggttcttgaacctctgggcctggttgaggagcctgttaagacggctccgggaaaaaagaggccggtagagcactctcctgtggagccagactcctcctcgggaaccggaaaagcgggccagcagcctgcaagaaaaagattgaattttggtcagactggagacgcagactccgtacctgacccccagcctctcggacagccaccagcagcccccacaagtttgggatctactacaatggctacaggcagtggcgcaccaatggcagacaataacgagggtgccgatggagtgggtaattcctcaggaaattggcattgcgattcccaatggctgggcgacagagtcatcaccaccagcacccgaacctgggccctgcccacctacaacaaccacctctacaagcaaatctccagccaatcaggagcatcgaacgacaaccactactttggccacagcaccccttgggggtattttgacttcaacagattccactgtcacttctccccacgtgactggcaaagactcatcaacaacaactggggattccgacccaagagactcaacttcaagctctttaacattcaagtcaaagaggtcacgcagaatgacggtacgacgacgattgccaataaccttaccagcacggttcaggtgtttactgactcggagtaccagctcccgtacgtcctcggctcggcgcatcaaggatgcctcccgccgttcccagcagacgtcttcatggtcccacagtatggatacctcaccctgaacaacgggagtcaggcggtaggacgctcttccttttactgcctggagtactttccttctcagatgcttcgtaccggaaacaactttaccttcagctacacctttgaagacgtgcctttccacagtagctacgctcacagccagagtctggatcggctgatgaatcctcttatcgaccagtacctgtattatctaaacaaaacacaatcaaatagtggaactcttcagcagtctcggctactgtttagtcaagctggacccaccagcatgtctcttcaagctaaaaactggctgcctggaccttgctacagacaacagcgtctgtcaaagcaggcaaacgacaacaacaacagcaactttccctggactgcggctacaaagtatcatctaaatggccgggactcgttggttaatccaggaccagctatggccagccacaaagacgatgaagaaaagtttttccccatgcatggaaccctgatatttggtaaacaaggaacaaatgctaacgacgcggatttggacaatgtcatgattacagatgaagaagaaatccgcaccaccaatcccttggctacggagcagtacgggactgtgtcaaataatttgcaaaactcaaatactggtccaactactggaactgtcaatcaccaaggagcgttacctggtatggtgtggcaggatcgagacgtgtacctgcagggacccatttgggccaagattcctcacaccgatggacactttcatccttctccactgatgggaggttttggactcaaacacccgcctcctcagatcatgatcaaaaacactcccgttccagccaatcctcctacaaacttcagttctgccaagtttgcttccttcatcacacagtattccacgggacaagtcagcgtggagattgagtgggagctgcagaaggagaacagcaaacgctggaaccccgagatccagtacacttccaactacaacaaatctgttaatgtggactttactgtggacactaatggcgtgtattcagagcctcgccccattggcaccagatacctgactcgtaatctgtaa

SEQ ID NO: 4365 - DNA, 2208 bp, Artificial Sequence
  Description of Artificial Sequence: Synthetic polynucleotide
atggctgccgatggttatcttccagattggctcgaggacactctctctgaaggaataagacagtggtggaagctcaaacctggcccaccaccgccaaagcccgcagagcggcacaaggacgacagtaggggtcttgtgcttcctgggtacaagtacctcggacccttcaacggactcgacaaaggagagccggtcaacgaggcagacgccgcggccctcgagcacgacaaggcctacgaccggcagctcgacagcggagacaacccgtacctcaagtacaaccacgccgacgcggagtttcaggagcgtcttaaagaagatacgtcttttgggggcaacctcggacgagcagtattccaggcgaaaaagagggttcttgaacctctgggcctggttgaggagcctgttaagacggctccgagaaaaaagaggccggtagagcactctcctgtggagccagactcctcctcgggaaccggaaaagcgggccagcagcctgcaagaaaaagattgaattttggtcagactggagacgcagactccgtacctgacccccagcctctcggacagccaccagcagcccccacaagtttgggatctactacaatggctacaggcagtggcgcaccaatggcagacaataacgagggtgccgatggagtgggtaattcctcaggaaattggcattgcgattcccaatggctgggcgacagagtcatcaccaccagcacccgaacctgggccctgcccacctacaacaaccacctctacaagcaaatctccagccaatcaggagcatcgaacgacaaccactactttggccacagcaccccttgggggtattttgacttcaacagattccactgtcacttctccccacgtgactggcaaagactcatcaacaacaactggggattccgacccaagagactcaacttcaagctctttaacattcaagtcaaagaggtcacgcagaatgacggtacgacgacgattgccaataaccttaccagcacggttcaggtgtttactgactcggagtaccagctcccgtacgtcctcggctcggcgcatcaaggatgcctcccgccgttcccagcagacgtcttcatggtcccacagtatggatacctcaccctgaacaacgggagtcaggcggtaggacgctcttccttttactgcctggagtactttccttctcagatgcttcgtaccggaaacaactttaccttcagctacacctttgaagacgtgcctttccacagtagctacgctcacagccagagtctggatcggctgatgaatcctcttatcgaccagtacctgtattatctaaacaaaacacaatcaaatagtggaactcttcagcagtctcggctactgtttagtcaagctggacccaccagcatgtctcttcaagctaaaaactggctgcctggaccttgctacagacaacagcgtctgtcaaagcaggcaaacgacaacaacaacagcaactttccctggactgcggctacaaagtatcatctaaatggccgggactcgttggttaatccaggaccagctatggccagccacaaagacgatgaagaaaagtttttccccatgcatggaaccctgatatttggtaaacaaggaacaaatgctaacgacgcggatttggacaatgtcatgattacagatgaagaagaaatccgcaccaccaatcccgtggctacggagcagtacgggactgtgtcaaataatttgcaaaactcaaatactggtccaactactggaactgtcaatcaccaaggagcgttacctggtatggtgtggcaggatcgagacgtgtacctgcagggacccatttgggccaagattcctcacaccgatggacactttcatccttctccactgatgggaggttttggactcaaacacccgcctcctcagatcatgatcaaaaacactcccgttccagccaatcctcctacaaacttcagttctgccaagtttgcttccttcatcacacagtattccacgggacaagtcagcgtggagattgagtgggagctgcagaaggagaacagcaaacgctggaaccccgagatccagtacacttccaactacaacaaatctgttaatgtggactttactgtggacactaatggcgtgtattcagagcctcgccccattggcaccagatacctgactcgtaatctgtaa

SEQ ID NO: 4366 - DNA, 2208 bp, Artificial Sequence
  Description of Artificial Sequence: Synthetic polynucleotide
atggctgccgatggttatcttccagattggctcgaggacactctctctgaaggaataagacagtggtggaagctcaaacctggcccaccaccgccaaagcccgcagagcggcacaaggacgacagtaggggtcttgtgcttcctgggtacaagtacctcggacccttcaacggactcgacaaaggagagccggtcaacgaggcagacgccgcggccctcgagcacgacaaggcctacgaccggcagctcgacagcggagacaacccgtacctcaagtacaaccacgccgacgcggagtttcaggagcgtcttaaagaagatacgtcttttgggggcaacctcggacgagcagtattccaggcgaaaaagagggttcttgaacctctgggcctggttgaggagcctgttaagacggctccgggaaaaaagaggccggtagagcactctcctgtggagccagactcctcctcgggaaccggaaaagcgggccagcagcctgcaagaaaaagattgaattttggtcagactggagacgcagactccgtacctgacccccagcctctcggacagccaccagcagcccccacaagtttgggatctactacaatggctacaggcagtggcgcaccaatggcagacaataacgagggtgccgatggagtgggtaattcctcaggaaattggcattgcgattcccaatggctgggcgacagagtcatcaccaccagcacccgaacctgggccctgcccacctacaacaaccacctctacaagcaaatctccagccaatcaggagcatcgaacgacaaccactactttggccacagcaccccttgggggtattttgacttcaacagattccactgtcacttctccccacgtgactggcaaagactcatcaacaacaactggggattccgacccaagagactcaacttcaagctctttaacattcaagtcaaagaggtcacgcagaatgacggtacgacgacgattgccaataaccttaccagcacggttcaggtgtttactgactcggagtaccagctcccgtacgtcctcggctcggcgcatcaaggatgcctcccgccgttcccagcagacgtcttcatggtcccacagtatggatacctcaccctgaacaacgggagtcaggcggtaggacgctcttccttttactgcctggagtactttccttctcagatgcttcgtaccggaaacaactttaccttcagctacacctttgaagacgtgcctttccacagtagctacgctcacagccagagtctggatcggctgatgaatcctcttatcgaccagtacctgtattatctaaacaaaacacaatcaaatagtggaactcttcagcagtctcggctactgtttagtcaagctggacccaccagcatgtctcttcaagctaaaaactggctgcctggaccttgctacagacaacagcgtctgtcaaagcaggcaaacgacaacaacaacagcaactttccctggactgcggctacaaagtatcatctaaatggccgggactcgttggttaatccaggaccagctatggccagccacaaagacgatgaagaaaagtttttccccatgcatggaaccctgatatttggtaaacaaggaacaaatgctaacgacgcggatttggacaatgtcatgattacagatgaagaagaaatccgcaccaccaatcccgtggctacggagcagtacgggactgtgtcaaataatttgcaaaactcaaatactggtccaactactggaactgtcaatcaccaaggagcgttacctggtatggtgtggcaggatcgagacgtgtacctgcagggacccatttgggccaagattcctcacaccgatggacgctttcatccttctccactgatgggaggttttggactcaaacacccgcctcctcagatcatgatcaaaaacactcccgttccagccaatcctcctacaaacttcagttctgccaagtttgcttccttcatcacacagtattccacgggacaagtcagcgtggagattgagtgggagctgcagaaggagaacagcaaacgctggaaccccgagatccagtacacttccaactacaacaaatctgttaatgtggactttactgtggacactaatggcgtgtattcagagcctcgccccattggcaccagatacctgactcgtaatctgtaa

SEQ ID NO: 4367 - DNA, 2208 bp, Artificial Sequence
  Description of Artificial Sequence: Synthetic polynucleotide
atggctgccgatggttatcttccagattggctcgaggacactctctctgaaggaataagacagtggtggaagctcaaacctggcccaccaccgccaaagcccgcagagcggcacaaggacgacagtaggggtcttgtgcttcctgggtacaagtacctcggacccttcaacggactcgacaaaggagagccggtcaacgaggcagacgccgcggccctcgagcacgacaaggcctacgaccggcagctcgacagcggagacaacccgtacctcaagtacaaccacgccgacgcggagtttcaggagcgtcttaaagaagatacgtcttttgggggcaacctcggacgagcagtattccaggcgaaaaagagggttcttgaacctctgggcctggttgaggagcctgttaagacggctccgggaaaaaagaggccggtagagcactctcctgtggagccagactcctcctcgggaaccggaaaagcgggccagcagcctgcaagaaaaagattgaattttggtcagactggagacgcagactccgtacctgacccccagcctctcggacagccaccagcagcccccacaagtttgggatctactacaatggctacaggcagtggcgcaccaatggcagacaataacgagggtgccgatggagtgggtaattcctcaggaaattggcattgcgattcccaatggctgggcgacagagtcatcaccaccagcacccgaacctgggccctgcccacctacagcaaccacctctacaagcaaatctccagccaatcaggagcatcgaacgacaaccactactttggccacagcaccccttgggggtattttgacttcaacagattccactgtcacttctccccacgtgactggcaaagactcatcaacaacaactggggattccgacccaagagactcaacttcaagctctttaacattcaagtcaaagaggtcacgcagaatgacggtacgacgacgattgccaataaccttaccagcacggttcaggtgtttactgactcggagtaccagctcccgtacgtcctcggctcggcgcatcaaggatgcctcccgccgctcccagcagacgtcttcatggtcccacagtatggatacctcaccctgaacaacgggagtcaggcggtaggacgctcttccttttactgcctggagtactttccttctcagatgcttcgtaccggaaacaactttaccttcagctacacctttgaagacgtgcctttccacagtagctacgctcacagccagagtctggatcggctgatgaatcctcttatcgaccagtacctgtattatctaaacaaaacacaatcaaatagtggaactcttcagcagtctcggctactgtttagtcaagctggacccaccagcatgtctcttcaagctaaaaactggctgcctggaccttgctacagacaacagcgtctgtcaaagcaggcaaacgacaacaacaacagcaactttccctggactgcggctacaaagtatcatctaaatggccgggactcgttggttaatccaggaccagctatggccagccacaaagacgatgaagaaaagtttttccccatgcatggaaccctgatatttggtaaacaaggaacaaatgctaacgacgcggatttggacaatgtcatgattacagatgaagaagaaatccgcaccaccaatcccgtggctacggagcagtacgggactgtgtcaaataatttgcaaaactcaaatactggtccaactactggaactgtcaatcaccaaggagcgttacctggtatggtgtggcaggatcgagacgtgtacctgcagggacccatttgggccaagattcctcacaccgatggacactttcatccttctccactgatgggaggttttggactcaaacacccgcctcctcagatcatgatcaaaaacactcccgttccagccaatcctcctacaaacttcagttctgccaagtttgcttccttcatcacacagtattccacgggacaagtcagcgtggagattgagtgggagctgcagaaggagaacagcaaacgctggaaccccgagatccagtacacttccaactacaacaaatctgttaatgtggactttactgtggacactaatggcgtgtattcagagcctcgccccattggcaccagatacctgactcgtaatctgtaa

SEQ ID NO: 4368 - DNA, 2208 bp, Artificial Sequence
  Description of Artificial Sequence: Synthetic polynucleotide
atggctgccgatggttatcttccagattggctcgaggacactctctctgaaggaataagacagtggtggaagctcaaacctggcccaccaccgccaaagcccgcagagcggcacaaggacgacagtaggggtcttgtgcttcctgggtacaagtacctcggacccttcaacggactcgacaaaggagagccggtcaacgaggcagacgccgcggccctcgagcacgacaaggcctacgaccggcagctcgacagcggagacaacccgtacctcaagtacaaccacgccgacgcggagtttcaggagcgtcttaaagaagatacgtcttttgggggcaacctcggacgagcagtattccaggcgaaaaagagggttcttgaacctctgggcctggttgaggagcctgttaagacggctccgggaaaaaagaggccggtagagcactctcctgtggagccagactcctcctcgggaaccggaaaagcgggccagcagcctgcaagaaaaagattgaattttggtcagactggaggcgcagactccgtacctgacccccagcctctcggacagccaccagcagcccccacaagtttgggatctactacaatggctacaggcagtggcgcaccaatggcagacaataacgagggtgccgatggagtgggtaattcctcaggaaattggcattgcgattcccaatggctgggcgacagagtcatcaccaccagcacccgaacctgggccctgcccacctacaacaaccacctctacaagcaaatctccagccaatcaggagcatcgaacgacaaccactactttggccacagcaccccttgggggtattttgacttcaacagattccactgtcacttctccccacgtgactggcaaagactcatcaacaacaactggggattccgacccaagagactcaacttcaagctctttaacattcaagtcaaagaggtcacgcagaatgacggtacgacgacgattgccaataaccttaccagcacggttcaggtgtttactgactcggagtaccagctcccgtacgtcctcggctcggcgcatcaaggatgcctcccgccgttcccagcagacgtcttcatggtcccacagtatggatacctcaccctgaacaacgggagtcaggcggtaggacgctcttccttttactgcctggagtactttccttctcagatgcttcgtaccggaaacaactttaccttcagctacacctttgaagacgtgcctttccacagtagctacgctcacagccagagtctggatcggctgatgaatcctcttatcgaccagtacctgtattatctaaacaaaacacaatcaaatagtggaactcttcagcagtctcggctactgtttagtcaagctggacccaccagcatgtctcttcaagctaaaaactggctgcctggaccttgctacagacaacagcgtctgtcaaagcaggcaaacgacaacaacaacagcaactttccctggactgcggctacaaagtatcatctaaatggccgggactcgttggttaatccaggaccagctatggccagccacaaagacgatgaagaaaagtttttccccatgcatggaaccctgatatttggtaaacaaggaacaaatgctaacgacgcggatttggacaatgtcatgattacagatgaagaagaaatccgcaccaccaatcccgtggctacggagcagtacgggactgtgtcaaataatttgcaaaactcaaatactggtccaactactggaactgtcaatcaccaaggagcgttacctggtatggtgtggcaggatcgagacgtgtacctgcagggacccatttgggccaagattcctcacaccgatggacactttcatccttctccactgatgggaggttttggactcaaacacccgcctcctcagatcatgatcaaaaacactcccgttccagccaatcctcctacaaacttcagttctgccaagtttgcttccttcatcacacagtattccacgggacaagtcagcgtggagattgagtgggagctgcagaaggagaacagcaaacgctggaaccccgagatccagtacacttccaactacaacaaatctgttaatgtggactttactgtggacactaatggcgtgtattcagagcctcgccccattggcaccagatacctgactcgtaatctgtaa

SEQ ID NO: 4369 - DNA, 2208 bp, Artificial Sequence
  Description of Artificial Sequence: Synthetic polynucleotide
atggctgccgatggttatcttccagattggctcgaggacactctctctgaaggaataagacagtggtggaagctcaaacctggcccaccaccgccaaagcccgcagagcggcacaaggacgacagtaggggtcttgtgcttcctgggtacaagtacctcggacccttcaacggactcgacaaaggagagccggtcaacgaggcagacgccgcggccctcgagcacggcaaggcctacgaccggcagctcgacagcggagacaacccgtacctcaagtacaaccacgccgacgcggagtttcaggagcgtcttaaagaagatacgtcttttgggggcaacctcggacgagcagtattccaggcgaaaaagagggttcttgaacctctgggcctggttgaggagcctgttaagacggctccgggaaaaaagaggccggtagagcactctcctgtggagccagactcctcctcgggaaccggaaaagcgggccagcagcctgcaagaaaaagattgaattttggtcagactggagacgcagactccgtacctgacccccagcctctcggacagccaccagcagcccccacaagtttgggatctactacaatggctacaggcagtggcgcaccaatggcagacaataacgagggtgccgatggagtgggtaattcctcaggaaattggcattgcgattcccaatggctgggcgacagagtcatcaccaccagcacccgaacctgggccctgcccacctacaacaaccacctctacaagcaaatctccagccaatcaggagcatcgaacgacaaccactactttggccacagcaccccttgggggtattttgacttcaacagattccactgtcacttctccccacgtgactggcaaagactcatcaacaacaactggggattccgacccaagagactcaacttcaagctctttaacattcaagtcaaagaggtcacgcagaatgacggtacgacgacgattgccaataaccttaccagcacggttcaggtgtttactgactcggagtaccagctcccgtacgtcctcggctcggcgcatcaaggatgcctcccgccgttcccagcagacgtcttcatggtcccacagtatggatacctcaccctgaacaacgggagtcaggcggtaggacgctcttccttttactgcctggagtactttccttctcagatgcttcgtaccggaaacaactttaccttcagctacacctttgaagacgtgcctttccacagtagctacgctcacagccagagtctggatcggctgatgaatcctcttatcgaccagtacctgtattatctaaacaaaacacaatcaaatagtggaactcttcagcagtctcggctactgtttagtcaagctggacccaccagcatgtctcttcaagctaaaaactggctgcctggaccttgctacagacaacagcgtctgtcaaagcaggcaaacgacaacaacaacagcaactttccctggactgcggctacaaagtatcatctaaatggccgggactcgttggttaatccaggaccagctatggccagccacaaagacgatgaagaaaagtttttccccatgcatggaaccctgatatttggtaaacaaggaacaaatgctaacgacgcggatttggacaatgtcatgattacagatgaagaagaaatccgcaccaccaatcccgtggctacggagcagtacgggactgtgtcaaataatttgcaaaactcaaatactggtccaactactggaactgtcaatcaccaaggagcgttacctggtatggtgtggcaggatcgagacgtgtacctgcagggacccatttgggccaagattcctcacaccgatggacactttcatccttctccactgatgggaggttttggactcaaacacccgcctcctcagatcatgatcaaaaacactcccgttccagccaatcctcctacaaacttcagttctgccaagtttgcttccttcatcacacagtattccacgggacaagtcagcgtggagattgagtgggagctgcagaaggagaacagcaaacgctggaaccccgagatccagtacacttccaactacaacaaatctgttaatgtggactttactgtggacactaatggcgtgtattcagagcctcgccccattggcaccagatacctgactcgtaatctgtaa

SEQ ID NO: 4370 - DNA, 2208 bp, Artificial Sequence
  Description of Artificial Sequence: Synthetic polynucleotide
atggctgccgatggttatcttccagattggctcgaggacactctctctgaaggaataagacagtggtggaagctcaaacctggcccaccaccgccaaagcccgcagagcggcacaaggacgacagtaggggtcttgtgcttcctgggtacaagtacctcggacccttcaacggactcgacaaaggagagccggtcaacgaggcagacgccgcggccctcgagcacgacaaggcctacgaccggcagctcgacagcggagacaacccgtacctcaagtacaaccacgccgacgcggagtttcaggagcgtcttaaagaagatacgtcttttgggggcaacctcggacgagcagtattccaggcgaaaaagagggttcttgaacctctgggcctggttgaggagcctgttaagacggctccgggaaaaaagaggccggtagagcactctcctgtggagccagactcctcctcgggaaccggaaaagcgggccagcagcctgcaagaaaaagattgaattttggtcagactggagacgcagactccgtacctgacccccagcctctcggacagccaccagcagcccccacaagtttgggatctactacaatggctacaggcagtggcgcaccaatggcagacaataacgagggtgccgatggagtgggtaattcctcaggaaattggcattgcgattcccaatggctgggcgacagagtcatcaccaccagcacccgaacctgggccctgcccacctacaacaaccacctctacaagcaaatctccagccaatcaggagcatcgaacgacaaccactactttggccacagcaccccttgggggtattttgacttcaacagattccactgtcacttctccccacgtgaccggcaaagactcatcaacaacaactggggattccgacccaagagactcaacttcaagctctttaacattcaagtcaaagaggtcacgcagaatgacggtacgacgacgattgccaataaccttaccagcacggttcaggtgtttactgactcggagtaccagctcccgtacgtcctcggctcggcgcatcaaggatgcctcccgccgttcccagcagacgtcttcatggtcccacagtatggatacctcaccctgaacaacgggagtcaggcggtaggacgctcttccttttactgcctggagtactttccttctcagatgcttcgtaccggaaacaactttaccttcagctacacctttgaagacgtgcctttccacagtagctacgctcacagccagagtctggatcggctgatgaatcctcttatcgaccagtacctgtattatctaaacaaaacacaatcaaatagtggaactcttcagcagtctcggctactgtttagtcaagctggacccaccagcatgtctcttcaagctaaaaactggctgcctggaccttgctacagacaacagcgtctgtcaaagcaggcaaacgacaacaacaacagcaactttccctggactgcggctacaaagtatcatctaaatggccgggactcgttggttaatccaggaccagctatggccagccacaaagacgatgaagaaaagtttttccccatgcatggaaccctgatatttggtaaacaaggaacaaatgctaacgacgcggatttggacaatgtcatgattacagatgaagaagaaatccgcaccaccaatcccgtggctacggagcagtacgggactgtgtcaaataatttgcaaaactcaaatactggtccaactactggaactgtcaatcaccaaggagcgttacctggtatggtgtggcaggatcgagacgtgtacctgcagggacccatttgggccaagattcctcacaccgatggacactttcatccttctccactgatgggaggttttggactcaaacacccgcctcctcagatcatgatcaaaaacactcccgttccagccaatcctcctacaaacttcagttctgccaagtttgcttccttcatcacacagtattccacgggacaagtcagcgtggagattgagtgggagctgcagaaggagaacagcaaacgctggaaccccgagatccagtacacttccaactacaacaaatctgttaatgtggactttactgtggacactaatggcgtgtattcagagcctcgccccattggcaccagatacctgactcgtaatctgtaa

SEQ ID NO: 4371 - DNA, 2208 bp, Artificial Sequence
  Description of Artificial Sequence: Synthetic polynucleotide
atggctgccgatggttatcttccagattggctcgaggacactctctctgaaggaataagacagtggtggaagctcaaacctggcccaccaccgccaaagcccgcagagcggcacaaggacgacagtaggggtcttgtgcttcctgggtacaagtacctcggacccttcaacggactcgacaaaggagagccggtcaacgaggcagacgccgcggccctcgagcacgacaaggcctacgaccggcagctcgacagcggagacaacccgtacctcaagtacaaccacgccgacgcggagtttcaggagcgtcttaaagaagatacgtcttttgggggcaacctcggacgagcagtattccaggcgaaaaagagggttcttgaacctctgggcctggttgaggagcctgttaagacggctccgggaaaaaagaggccggtagagcactctcctgtggagccagactcctcctcgggaaccggaaaagcgggccagcagcctgcaagaaaaagattgaattttggtcagactggagacgcagactccgtacctgacccccagcctctcggacagccaccagcagcccccacaagtttgggatctactacaatggctacaggcagtggcgcaccaatggcagacaataacgagggtgccgatggagtgggtaattcctcaggaaattggcattgcgattcccaatggctgggcgacagagtcatcaccaccagcacccgaacctgggccctgcccacctacaacaaccacctctacaagcaaatctccagccaatcaggagcatcgaacgacaaccactactttggccacagcaccccttgggggtattttgacttcaacagattccactgtcacttctccccacgtgactggcaaagactcatcaacaacaactggggattccgacccaagagacccaacttcaagctctttaacattcaagtcaaagaggtcacgcagaatgacggtacgacgacgattgccaataaccttaccagcacggttcaggtgtttactgactcggagtaccagctcccgtacgtcctcggctcggcgcatcaaggatgcctcccgccgttcccagcagacgtcttcatggtcccacagtatggatacctcaccctgaacaacgggagtcaggcggtaggacgctcttccttttactgcctggagtactttccttctcagatgcttcgtaccggaaacaactttaccttcagctacacctttgaagacgtgcctttccacagtagctacgctcacagccagagtctggatcggctgatgaatcctcttatcgaccagtacctgtattatctaaacaaaacacaatcaaatagtggaactcttcagcagtctcggctactgtttagtcaagctggacccaccagcatgtctcttcaagctaaaaactggctgcctggaccttgctacagacaacagcgtctgtcaaagcaggcaaacgacaacaacaacagcaactttccctggactgcggctacaaagtatcatctaaatggccgggactcgttggttaatccaggaccagctatggccagccacaaagacgatgaagaaaagtttttccccatgcatggaaccctgatatttggtaaacaaggaacaaatgctaacgacgcggatttggacaatgtcatgattacagatgaagaagaaatccgcaccaccaatcccgtggctacggagcagtacgggactgtgtcaaataatttgcaaaactcaaatactggtccaactactggaactgtcaatcaccaaggagcgttacctggtatggtgtggcaggatcgagacgtgtacctgcagggacccatttgggccaagattcctcacaccgatggacactttcatccttctccactgatgggaggttttggactcaaacacccgcctcctcagatcatgatcaaaaacactcccgttccagccaatcctcctacaaacttcagttctgccaagtttgcttccttcatcacacagtattccacgggacaagtcagcgtggagattgagtgggagctgcagaaggagaacagcaaacgctggaaccccgagatccagtacacttccaactacaacaaatctgttaatgtggactttactgtggacactaatggcgtgtattcagagcctcgccccattggcaccagatacctgactcgtaatctgtaa

SEQ ID NO: 4372 - DNA, 2208 bp, Artificial Sequence
  Description of Artificial Sequence: Synthetic polynucleotide
atggctgccgatggttatcttccagattggctcgaggacactctctctgaaggaataagacagtggtggaagctcaaacctggcccaccaccgccaaagcccgcagagcggcacaaggacgacagtaggggtcttgtgcttcctgggtacaagtacctcggacccttcaacggactcgacaaaggagagccggtcaacgaggcagacgccgcggccctcgagcacgacaaggcctacgaccggcagctcgacagcggagacaacccgtacctcaagtacaaccacgccgacgcggagtttcaggagcgtcttaaagaagatacgtcttttgggggcaacctcggacgagcagtattccaggcgaaaaagagggttcttgaacctctgggcctggttgaggagcctgttaagacggctccgggaaaaaagaggccggtagagcactctcctgtggagccagactcctcctcgggaaccggaaaagcgggccagcagcctgcaagaaaaagattgaattttggtcagactggagacgcagactccgtacctgacccccagcctctcggacagccaccagcagcccccacaagtttgggatctactacaatggctacaggcagtggcgcaccaatggcagacaataacgagggtgccgatggagtgggtaattcctcaggaaattggcattgcgattcccaatggctgggcgacagagtcatcaccaccagcacccgaacctgggccctgcccacctacaacaaccacctctacaagcaaatctccagccaatcaggagcatcgaacgacaaccactactttggccacagcaccccttgggggtattttgacttcaacagattccactgtcacttctccccacgtgactggcaaagactcatcaacaacaactggggattccgacccaagagactcaacttcaagctctttaacattcaagtcaaagaggtcacgcagaatgacggtacgacgacgattgccaataaccttaccagcacggttcaggtgtttactgactcggagtaccagctcccgtacgtcctcggctcggcgcatcaaggatgcctcccgccgttcccagcagacgtcttcatggtcccacagtatggatacctcaccctgaacaacgggagtcaggcggtaggacgctcttccttttactgcctggagtactttccttctcagatgcttcgtaccggaaacaactttaccttcagctacacctttgaagacgtgcctttccacagtagctacgctcacagccagagtctggatcggctgatgaatcctcttatcgaccagtacctgtattatctaaacaaaacacaatcaaatagtggaactcttcagcagtctcggctactgtttagtcaagctggacccaccagcatgtctcttcaagctaaaaactggctgcctggaccttgctacagacaacagcgtctgtcaaagcaggcaaacgacaacaacaacagcaactttccctggactgcggctacaaagtatcatctaaatggccgggactcgttggttaatccaggaccagctatggccagccacaaagacgatgaagaaaagtttttccccatgcatggaaccctgatatttggtaaacaaggaacaaatgctaacgacgcggatttggacaatgtcatgattacagatgaagaagaaatccgcaccaccaatcccgtggctacggagcagtacgggactgtgtcaaataatttgcaaaactcaaatactggtccaactactggaactgtcaatcaccaaggagcgttacctggtatggtgtggcaggatcgagacgtgtacctgcagggacccatttgggccaagattcctcacaccgatggacactttcatccttctccactgatgggaggttttggactcaaacacccgcctcctcagatcatgatcaaaaacactcccgttccagccaatcctcctacaaacttcagttctgccaagtttgcttccttcatcacacagtattccacgggacaagtcagcgtggagattgagtgggagctgcagaaggagaacagcaaacgctggaaccccgagatccagtacacttccaactacaacaaatctgttaatgtggactttactgtgggcactaatggcgtgtattcagagcctcgccccattggcaccagatacctgactcgtaatctgtaa

SEQ ID NO: 4373 - DNA, 2208 bp, Artificial Sequence
  Description of Artificial Sequence: Synthetic polynucleotide
atggctgccgatggttatcttccagattggctcgaggacactctctctgaaggaataagacagtggtggaagctcaaacctggcccaccaccgccaaagcccgcagagcggcacaaggacgacagtaggggtcttgtgcttcctgggtacaagtacctcggacccttcaacggactcgacaaaggagagccggtcaacgaggcagacgccgcggccctcgagcacgacaaggcctacgaccggcagctcgacagcggagacaacccgtacctcaagtacaaccacgccgacgcggagtttcaggagcgtcttaaagaagatacgtcttttgggggcaacctcggacgagcagtattccaggcgaaaaagagggttcttgaacctctgggcctggttgaggagcctgttaagacggctccgggaaaaaagaggccggtagagcactctcctgtggagccagactcctcctcgggaaccggaaaagcgggccagcagcctgcaagaaaaagattgaattttggtcagactggagacgcagactccgtacctgacccccagcctctcggacagccaccagcagcccccacaagtttgggatctactacaatggctacaggcagtggcgcaccaatggcagacaataacgagggtgccgatggagtgggtaattcctcaggaaattggcattgcgattcccaatggctgggcgacagagtcatcaccaccagcacccgaacctgggccctgcccacctacaacaaccacctctacaagcaaatctccagccaatcaggagcatcgaacgacaaccactactttggccacagcaccccttgggggtattttgacttcaacagattccactgtcacttctccccacgtgactggcaaagactcatcaacaacaactggggattccgacccaagagactcaacttcaagctctttaacattcaagtcaaagaggtcacgcagaatgacggtacgacgacgattgccaataaccttaccagcacggttcaggtgtttactgactcggagtaccagctcccgtacgtcctcggctcggcgcatcaaggatgcctcccgccgttcccagcagacgtcttcatggtcccacagtatggatacctcaccctgaacaacgggagtcaggcggtaggacgctcttccttttactgcctggagtactttccttctcagatgcttcgtaccggaaacaactttaccttcagctacacctttgaagacgtgcctttccacagtagctacgctcacagccagagtctggatcggctgatgaatcctcttatcgaccagtacctgtattatctaaacaaaacacaatcaaatagtggaactcttcagcagtctcggctactgtttagtcaagctggacccaccagcacgtctcttcaagctaaaaactggctgcctggaccttgctacagacaacagcgtctgtcaaagcaggcaaacgacaacaacaacagcaactttccctggactgcggctacaaagtatcatctaaatggccgggactcgttggttaatccaggaccagctatggccagccacaaagacgatgaagaaaagtttttccccatgcatggaaccctgatatttggtaaacaaggaacaaatgctaacgacgcggatttggacaatgtcatgattacagatgaagaagaaatccgcaccaccaatcccgtggctacggagcagtacgggactgtgtcaaataatttgcaaaactcaaatactggtccaactactggaactgtcaatcaccaaggagcgttacctggtatggtgtggcaggatcgagacgtgtacctgcagggacccatttgggccaagattcctcacaccgatggacactttcatccttctccactgatgggaggttttggactcaaacacccgcctcctcagatcatgatcaaaaacactcccgttccagccaatcctcctacaaacttcagttctgccaagtttgcttccttcatcacacagtattccacgggacaagtcagcgtggagattgagtgggagctgcagaaggagaacagcaaacgctggaaccccgagatccagtacacttccaactacaacaaatctgttaatgtggactttactgtggacactaatggcgtgtattcagagcctcgccccattggcaccagatacctgactcgtaatctgtaa

SEQ ID NO: 4374 - DNA, 2208 bp, Artificial Sequence
  Description of Artificial Sequence: Synthetic polynucleotide
atggctgccgatggttatcttccagattggctcgaggacactctctctgaaggaataagacagtggtggaagctcaaacctggcccaccaccgccaaagcccgcagagcggcacaaggacgacagtaggggtcttgtgcttcctgggtacaagtacctcggacccttcaacggactcgacaaaggagagccggtcaacgaggcagacgccgcggccctcgagcacgacaaggcctacgaccggcagctcgacagcggagacaacccgtacctcaagtacaaccacgccgacgcggagtttcaggagcgtcttaaagaagatacgtcttttgggggcaacctcggacgagcagtattccaggcgaaaaagagggttcttgaacctctgggcctggttgaggagcctgttaagacggctccgggaaaaaagaggccggtagagcactctcctgtggagccagactcctcctcgggaaccggaaaagcgggccagcagcctgcaagaaaaagattgaattttggtcagactggagacgcagactccgtacctgacccccagcctctcggacagccaccagcagcccccacaagtttgggatctactacaatggctacaggcagtggcgcaccaatggcagacaataacgagggtgccgatggagtgggtaattcctcaggaaattggcattgcgattcccaatggctgggcgacagagtcatcaccaccagcacccgaacctgggccctgcccacctacaacaaccacctctacaagcaaatctccagccaatcaggagcatcgaacgacaaccactactttggccacagcaccccttgggggtattttgacttcaacagattccactgtcacttctccccacgtgactggcaaagactcatcaacaacaactggggattccgacccaagagactcaacttcaagctctttaacattcaagtcaaagaggtcacgcagaatgacggtacgacgacgattgccaataaccttaccagcacggttcaggtgtttactgactcggagtaccagctcccgtacgtcctcggctcggcgcatcaaggatgcctcccgccgttcccagcagacgtcttcatggtcccacagtatggatacctcaccctgaacaacgggagtcaggcggtaggacgctcttccttttactgcctggagtactttccttctcagatgcttcgtaccggaaacaactttaccttcagctacacctttgaagacgtgcctttccacagtagctacgctcacagccagagtctggatcggctgatgaatcctcttatcgaccagtacctgtattatctaaacaaaacacaatcaaatagtggaactcttcagcagtctcggctactgtttagtcaagctggacccaccagcatgtctcttcaagctaaaaactggctgcctggaccttgctacagacaacagcgtctgtcaaagcaggcaaacgacaacaacaacagcaactttccctggactgcggctacaaagtatcatctaaatggccgggactcgttggttaatccaggaccagctatggccagccacaaagacgatgaagaaaagtttttccccatgcatggaaccctgatatttggtaaacaaggaacaaatgctaacgacgcggatttggacaatgtcatgattacagatgaagaagaaatccgcaccaccaatcccgtggctacggagcagtacgggactgtgtcaaataatttgcaaaactcaaatactggtccaactactggaactatcaatcaccaaggagcgttacctggtatggtgtggcaggatcgagacgtgtacctgcagggacccatttgggccaagattcctcacaccgatggacactttcatccttctccactgatgggaggttttggactcaaacacccgcctcctcagatcatgatcaaaaacactcccgttccagccaatcctcctacaaacttcagttctgccaagtttgcttccttcatcacacagtattccacgggacaagtcagcgtggagattgagtgggagctgcagaaggagaacagcaaacgctggaaccccgagatccagtacacttccaactacaacaaatctgttaatgtggactttactgtggacactaatggcgtgtattcagagcctcgccccattggcaccagatacctgactcgtaatctgtaa

SEQ ID NO: 4375 - DNA, 2208 bp, Artificial Sequence
  Description of Artificial Sequence: Synthetic polynucleotide
atggctgccgatggttatcttccagattggctcgaggacactctctctgaaggaataagacagtggtggaagctcaaacctggcccaccaccgccaaagcccgcagagcggcacaaggacgacagtaggggtcttgtgcttcctgggtacaagtacctcggacccttcaacggactcgacaaaggagagccggtcaacgaggcagacgccgcggccctcgagcacgacaaggcctacgaccggcagctcgacagcggagacaacccgtacctcaagtacaaccacgccgacgcggagtttcaggagcgtcttaaagaagatacgtcttttgggggcaacctcggacgagcagtattccaggcgaaaaagagggttcttgaacctctgggcctggttgaggagcctgttaagacggctccgggaaaaaagaggccggtagagcactctcctgtggagccagactcctcctcgggaaccggaaaagcgggccagcagcctgcaagaaaaagattgaattttggtcagactggagacgcagactccgtacctgacccccagcctctcggacagccaccagcagcccccacaagtttgggatctactacaatggctacaggcagtggcgcaccaatggcagacaataacgagggtgccgatggagtgggtaattcctcaggaaattggcattgcgattcccaatggctgggcgacagagtcatcaccaccagcacccgaacctgggccctgcccacctacaacaaccacctctacaagcaaatctccagccaatcaggagcatcgaacgacaaccactactttggccacagcaccccttgggggtattttgacttcaacagattccactgtcacttctccccacgtgactggcaaagactcatcaacaacaactggggattccgacccaagagactcaacttcaagctctttaacattcaagtcaaagaggtcacgcagaatgacggtacggcgacgattgccaataaccttaccagcacggttcaggtgtttactgactcggagtaccagctcccgtacgtcctcggctcggcgcatcaaggatgcctcccgccgttcccagcagacgtcttcatggtcccacagtatggatacctcaccctgaacaacgggagtcaggcggtaggacgctcttccttttactgcctggagtactttccttctcagatgcttcgtaccggaaacaactttaccttcagctacacctttgaagacgtgcctttccacagtagctacgctcacagccagagtctggatcggctgatgaatcctcttatcgaccagtacctgtattatctaaacaaaacacaatcaaatagtggaactcttcagcagtctcggctactgtttagtcaagctggacccaccagcatgtctcttcaagctaaaaactggctgcctggaccttgctacagacaacagcgtctgtcaaagcaggcaaacgacaacaacaacagcaactttccctggactgcggctacaaagtatcatctaaatggccgggactcgttggttaatccaggaccagctatggccagccacaaagacgatgaagaaaagtttttccccatgcatggaaccctgatatttggtaaacaaggaacaaatgctaacgacgcggatttggacaatgtcatgattacagatgaagaagaaatccgcaccaccaatcccgtggctacggagcagtacgggactgtgtcaaataatttgcaaaactcaaatactggtccaactactggaactgtcaatcaccaaggagcgttacctggtatggtgtggcaggatcgagacgtgtacctgcagggacccatttgggccaagattcctcacaccgatggacactttcatccttctccactgatgggaggttttggactcaaacacccgcctcctcagatcatgatcaaaaacactcccgttccagccaatcctcctacaaacttcagttctgccaagtttgcttccttcatcacacagtattccacgggacaagtcagcgtggagattgagtgggagctgcagaaggagaacagcaaacgctggaaccccgagatccagtacacttccaactacaacaaatctgttaatgtggactttactgtggacactaatggcgtgtattcagagcctcgccccattggcaccagatacctgactcgtaatctgtaa

SEQ ID NO: 4376 - DNA, 2208 bp, Artificial Sequence
  Description of Artificial Sequence: Synthetic polynucleotide
atggctgccgatggttatcttccagattggctcgaggacactctctctgaaggaataagacagtggtggaagctcaaacctggcccaccaccgccaaagcccgcagagcggcacaaggacgacagtaggggtcttgtgcttcctgggtacaagtacctcggacccttcaacggactcgacaaaggagagccggtcaacgaggcagacgccgcggccctcgagcacgacaaggcctacgaccggcagctcgacagcggagacaacccgtacctcaagtacaaccacgccgacgcggagtttcaggagcgtcttaaagaagatacgtcttttgggggcaacctcggacgagcagtattccaggcgaaaaagagggttcttgaacctctgggcctggttgaggagcctgttaagacggctccgggaaaaaagaggccggtagagcactctcctgtggagccagactcctcctcgggaaccggaaaagcgggccagcagcctgcaagaaaaagattgaattttggtcagactggagacgcagactccgtacctgacccccagcctctcggacagccaccagcagcccccacaagtttgggatctactacaatggctacaggcagtggcgcaccaatggcagacaataacgagggtgccgatggagtgggtaattcctcaggaaattggcattgcgattcccaatggctgggcgacagagtcatcaccaccagcacccgaacctgggccctgcccacctacaacaaccacctctacaagcaaatctccagccaatcaggagcatcgaacgacaaccactactttggccacagcaccccttgggggtattttgacttcaacagattccactgtcacttctccccacgtgactggcaaagactcatcaacaacaactggggattccgacccaagagactcaacttcaagctctttaacattcaagtcaaagaggtcacgcagaatgacggtacgacgacgattgccaataaccttaccagcacggttcaggtgtttactgactcggagtaccagctcccgtacgtcctcggctcggcgcatcaaggatgcctcccgccgttcccagcagacgtcttcatggtcccacagtatggatacctcaccctgaacaacgggagtcaggcggtaggacgctcttccttttactgcctggagtactttccttctcagatgcttcgtaccggaaacaactttaccttcagctacacctttgaagacgtgcctttccacagtagctacgctcacagccagagtctggatcggctgatgaatcctcttatcgaccagtacctgtattatctaaacaaaacacaatcaaatagtggaactcttcagcagtctcggctactgtttagtcaagctggacccaccagcatgtctcttcaagctaaaaactggctgcctggaccttgctacagacaacagcgtctgtcaaagcaggcaaacgacaacaacaacagcaactttccctggactgtggctacaaagtatcatctaaatggccgggactcgttggttaatccaggaccagctatggccagccacaaagacgatgaagaaaagtttttccccatgcatggaaccctgatatttggtaaacaaggaacaaatgctaacgacgcggatttggacaatgtcatgattacagatgaagaagaaatccgcaccaccaatcccgtggctacggagcagtacgggactgtgtcaaataatttgcaaaactcaaatactggtccaactactggaactgtcaatcaccaaggagcgttacctggtatggtgtggcaggatcgagacgtgtacctgcagggacccatttgggccaagattcctcacaccgatggacactttcatccttctccactgatgggaggttttggactcaaacacccgcctcctcagatcatgatcaaaaacactcccgttccagccaatcctcctacaaacttcagttctgccaagtttgcttccttcatcacacagtattccacgggacaagtcagcgtggagattgagtgggagctgcagaaggagaacagcaaacgctggaaccccgagatccagtacacttccaactacaacaaatctgttaatgtggactttactgtggacactaatggcgtgtattcagagcctcgccccattggcaccagatacctgactcgtaatctgtaa

SEQ ID NO: 4377 - DNA, 2208 bp, Artificial Sequence
  Description of Artificial Sequence: Synthetic polynucleotide
atggctgccgatggttatcttccagattggctcgaggacactctctctgaaggaataagacagtggtggaagctcaaacctggcccaccaccgccaaagcccgcagagcggcacaaggacgacagtaggggtcttgtgcttcctgggtacaagtacctcggacccttcaacggactcgacaaaggagagccggtcaacgaggcagacgccgcggccctcgagcacgacaaggcctacgaccggcagctcgacagcggagacaacccgtacctcaagtacaaccacgccgacgcggagtttcaggagcgtcttaaagaagatacgtcttttgggggcaacctcggacgagcagtattccaggcgaaaaagagggttcttgaacctctgggcctggttgaggagcctgttaagacggctccgggaaaaaagaggccggtagagcactctcctgtggagccagactcctcctcgggaaccggaaaagcgggccagcagcctgcaagaaaaagattgaattttggtcagactggagacgcagactccgtacctgacccccagcctctcggacagccaccagcagcccccacaagtttgggatctactacaatggctacaggcagtggcgcaccaatggcagacaataacgagggtgccgatggagtgggtaattcctcaggaaattggcattgcgattcccaatggctgggcgacagagtcatcaccaccagcacccgaacctgggccctgcccacctacaacaaccacctctacaagcaaatctccagccaatcaggagcatcgaacgacaaccactactttggccacagcaccccttgggggtattttgacttcaacagattccactgtcacttctccccacgtgactggcaaagactcatcaacaacaactggggattccgacccaagagactcaacttcaagctctttaacattcaagtcaaagaggtcacgcagaatgacggtacgacgacgattgccaataaccttaccagcacggttcaggtgtttactgactcggagtaccagctcccgtacgtcctcggctcggcgcatcaaggatgcctcccgccgttcccagcagacgtcttcatggtcccacagtatggatacctcaccctgaacaacgggagtcaggcggtaggacgctcttccttttactgcctggagtactttccttctcagatgcttcgtaccggaaacaactttaccttcagctacacctttgaagacgtgcctttccacagtagctacgctcacagccagagtctggatcggctgatgaatcctcttatcgaccagtacctgtattatctaaacaaaacacaatcaaatagtggaactcttcagcagtctcggctactgtttagtcaagctggacccaccagcatgtctcttcaagctaaaaactggctgcctggaccttgctacagacaacagcgtctgtcaaagcaggcaaacgacaacaacaacagcaactttccctggactgcggctacaaagtatcatctaaatggccgggactcgttggttaatccaggaccagctatggccagccacaaagacgatgaagaaaagtttttccccatgcatggaaccctgatatttggtaaacaaggaacaaatgctaacgacgcggatttggacaatgtcatgattacagatgaagaagaaatccgcaccaccaatcccgtggctacggagcagtacgggactgtgtcaaataatttgcaaaactcaaatactggtccaactactggaactgtcaatcaccaaggagcgttacctggtatggtgtggcaggatcgagacgtgtacctgcagggacccatttgggccaagattcctcacaccgatggacactttcatccttctccactgatgggaggttttggactcaaacacccgcctcctcagatcatgatcaaaaacactcccgttccagccaatcctcctacaaacttcagttctgccaagtttgcttccttcatcacacagcattccacgggacaagtcagcgtggagattgagtgggagctgcagaaggagaacagcaaacgctggaaccccgagatccagtacacttccaactacaacaaatctgttaatgtggactttactgtggacactaatggcgtgtattcagagcctcgccccattggcaccagatacctgactcgtaatctgtaa

SEQ ID NO: 4378 - DNA, 2208 bp, Artificial Sequence
  Description of Artificial Sequence: Synthetic polynucleotide
atggctgccgatggttatcttccagattggctcgaggacactctctctgaaggaataagacagtggtggaagctcaaacctggcccaccaccgccaaagcccgcagagcggcacaaggacgacggtaggggtcttgtgcttcctgggtacaagtacctcggacccttcaacggactcgacaaaggagagccggtcaacgaggcagacgccgcggccctcgagcacgacaaggcctacgaccggcagctcgacagcggagacaacccgtacctcaagtacaaccacgccgacgcggagtttcaggagcgtcttaaagaagatacgtcttttgggggcaacctcggacgagcagtattccaggcgaaaaagagggttcttgaacctctgggcctggttgaggagcctgttaagacggctccgggaaaaaagaggccggtagagcactctcctgtggagccagactcctcctcgggaaccggaaaagcgggccagcagcctgcaagaaaaagattgaattttggtcagactggagacgcagactccgtacctgacccccagcctctcggacagccaccagcagcccccacaagtttgggatctactacaatggctacaggcagtggcgcaccaatggcagacaataacgagggtgccgatggagtgggtaattcctcaggaaattggcattgcgattcccaatggctgggcgacagagtcatcaccaccagcacccgaacctgggccctgcccacctacaacaaccacctctacaagcaaatctccagccaatcaggagcatcgaacgacaaccactactttggctacagcaccccttgggggtattttgacttcaacagattccactgtcacttctccccacgtgactggcaaagactcatcaacaacaactggggattccgacccaagagactcaacttcaagctctttaacattcaagtcaaagaggtcacgcagaatgacggtacgacgacgattgccaataaccttaccagcacggttcaggtgtttactgactcggagtaccagctcccgtacgtcctcggctcggcgcatcaaggatgcctcccgccgttcccagcagacgtcttcatggtcccacagtatggatacctcaccctgaacaacgggagtcaggcggtaggacgctcttccttttactgcctggagtactttccttctcagatgcttcgtaccggaaacaactttaccttcagctacacctttgaagacgtgcctttccacagtagctacgctcacagccagagtctggatcggctgatgaatcctcttatcgaccagtacctgtattatctaaacaaaacacaatcaaatagtggaactcttcagcagtctcggctactgtttagtcaagctggacccaccagcatgtctcttcaagctaaaaactggctgcctggaccttgctacagacaacagcgtctgtcaaagcaggcaaacgacaacaacaacagcaactttccctggactgcggctacaaagtatcatctaaatggccgggactcgttggttaatccaggaccagctatggccagccacaaagacgatgaagaaaagtttttccccatgcatggaaccctgatatttggtaaacaaggaacaaatgctaacgacgcggatttggacaatgtcatgattacagatgaagaagaaatccgcaccaccaatcccgtggctacggagcagtacgggactgtgtcaaataatttgcaaaactcaaatactggtccaactactggaactgtcaatcaccaaggagcgttacctggtatggtgtggcaggatcgagacgtgtacctgcagggacccatttgggccaagattcctcacaccgatggacactttcatccttctccactgatgggaggttttggactcaaacacccgcctcctcagatcatgatcaaaaacactcccgttccagccaatcctcctacaaacttcagttctgccaagtttgcttccttcatcacacagtattccacaggacaagtcagcgtggagattgagtgggagctgcagaaggagaacagcaaacgctggaaccccgagatccagtacacttccaactacaacaaatctgttaatgtggactttactgtggacactaatggcgtgtattcagagcctcgccccattggcaccagatacctgactcgtaatctgtaa

SEQ ID NO: 4379 - DNA, 2208 bp, Artificial Sequence
  Description of Artificial Sequence: Synthetic polynucleotide
atggctgccgatggttatcttccagattggctcgaggacactctctctgaaggaataagacagtggtggaagctcaaacctggcccaccaccgccaaagcccgcagagcggcacaaggacgacagtaggggtcttgtgcttcctgggtacaagtacctcggacccttcaacggactcgacaaaggagagccggtcaacgaggcagacgccgcggccctcgagcacgacaaggcctacgaccggcagctcgacagcggagacaacccgtacctcaagtacaaccacgccgacgcggagcttcaggagcgtcttaaagaagatacgtcttttgggggcaacctcggacgagcagtattccaggcgaaaaagagggttcttgaacctctgggcctggttgaggagcctgttaagacggctccgggaaaaaagaggccggtagagcactctcctgtggagccagactcctcctcgggaaccggaaaagcgggccagcagcctgcaagaaaaagattgaattttggtcagactggagacgcagactccgtacctgacccccagcctctcggacagccaccagcagcccccacaagtttgggatctactacaatggctacaggcagtggcgcaccaatggcagacaataacgagggtgccgatggagtgggtaattcctcaggaaattggcattgcgattcccaatggctgggcgacagagtcatcaccaccagcacccgaacctgggccctgcccacctacaacaaccacctctacaagcaaatctccagccaatcaggagcatcgaacgacaaccactactttggctacagcaccccttgggggtattttgacttcaacagattccactgtcacttctccccacgtgactggcaaagactcatcaacaacaactggggattccgacccaagagactcaacttcaagctctttaacattcaagtcaaagaggtcacgcagaatgacggtacgacgacgattgccaataaccttaccagcacggttcaggtgtttactgactcggagtaccagctcccgtacgtcctcggctcggcgcatcaaggatgcctcccgccgttcccagcagacgtcttcatggtcccacagtatggatacctcaccctgaacaacgggagtcaggcggtaggacgctcttccttttactgcctggagtactttccttctcagatgcttcgtaccggaaacaactttaccttcagctacacctttgaagacgtgcctttccacagtagctacgctcacagccagagtctggatcggctgatgaatcctcttatcgaccagtacctgtattatctaaacaaaacacaatcaaatagtggaactcttcagcagtctcggctactgtttagtcaagctggacccaccagcatgtctcttcaagctaaaaactggctgcctggaccttgctacagacaacagcgtctgtcaaagcaggcaaacgacaacaacaacagcaactttccctggactgcggctacaaagtatcatctaaatggccgggactcgttggttaatccaggaccagctatggccagccacaaagacgatgaagaaaagtttttccccatgcatggaaccctgatatttggtaaacaaggaacaaatgctaacgacgcggatttggacaatgtcatgattacagatgaagaagaaatccgcaccaccaatcccgtggctacggagcagtacgggactgtgtcaaataatttgcaaaactcaaatactggtccaactactggaactgtcaatcaccaaggagcgttacctggtatggtgtggcaggatcgagacgtgtacctgcagggacccatttgggccaagattcctcacaccgatggacactttcatccttctccactgatgggaggttttggactcaaacacccgcctcctcagatcatgatcaaaaacactcccgttccagccaatcctcctacaaacttcagttctgccaagtttgcttccttcatcacacagtattccacaggacaagtcagcgtggagattgagtgggagctgcagaaggagaacagcaaacgctggaaccccgagatccagtacacttccaactacaacaaatctgttaatgtggactttactgtggacactaatggcgtgtattcagagcctcgccccattggcaccagatacctgactcgtaatctgtaa

SEQ ID NO: 4380 - DNA, 2208 bp, Artificial Sequence
  Description of Artificial Sequence: Synthetic polynucleotide
atggctgccgatggttatcttccagattggctcgaggacactctctctgaaggaataagacagtggtggaagctcaaacctggcccaccaccgccaaagcccgcagagcggcacaaggacgacagtaggggtcttgtgcttcctgggtacaagtacctcggacccttcaacggactcgacaaaggagagccggtcaacgaggcagacgccgcggccctcgagcacgacaaggcctacgaccggcagctcgacagcggagacaacccgtacctcaagtacaaccacgccgacgcggagtttcaggagcgtcttaaagaagatacgtcttttgggggcaacctcggacgagcagtattccaggcgaaaaagagggttcttgaacctctgggcctggttgaggagcctgttaagacggctccgggaaaaaagaggccggtagagcactctcctgtggagccagactcctcctcgggaaccggaaaagcgggccagcagcctgcaagaaaaagattgaattttggtcagactggagacgcagactccgtacctgacccccagcctctcggacagccaccagcagcccccacaagtttgggatctactacaatggctacaggcagtggcgcaccaatggcagacaataacgagggtgccgatggagtgggtaattcctcaggaaattggcattgcgattcccaatggctgggcgacagagtcatcaccaccagcacccgaacctgggccctgcccacctacaacaaccacctctacaagcaaatctccagccaatcaggagcatcgaacgacaaccactactttggctacagcaccccttgggggtattttgacttcaacagattccactgtcacttctccccacgtgactggcaaagactcatcaacaacaactggggattccgacccaagagactcaacttcaagctctttaacattcaagtcaaagaggtcacgcagaatgacggtacgacgacgattgccaataaccttaccagcacggttcaggtgtttactgactcggagtaccagctcccgtacgtcctcggctcggcgcatcaaggatgcctcccgccgttcccagcagacgtcttcatggtcccacagtatggatacctcaccctgaacaacgggagtcaggcggtaggacgctcttccttttactgcctggagtactttccttctcagatgcttcgtaccggaaacaactttaccttcagctacacctttgaagacgtgcctttccacagtagctacgctcacagccagagtctggatcggctgatgaatcctcttatcgaccagtacctgtattatctaaacaaaacacaatcaaatagtggaactcttcagcagtctcggctactgtttagtcaagctggacccaccagcatgtctcttcaagctaaaaactggctgcctggaccttgctacagacaacagcgtctgtcaaagcaggcaaacgacaacaacaacagcaactttccctggactgcggctacaaagtatcatctaaatggccgggactcgttggttaatccaggaccagctatggccagccacaaagacgatgaagaaaagtttttccccatgcatggaaccctgatatttggtaaacaaggaacaaatgctaacgacgcggatttggacaatgtcatgattacagatgaagaagaaatccgcaccaccaatcccgtggctacggagcagtacgggactgtgtcaaataatttgcaaaactcaaatactggtccaactactggaactgtcaatcaccaaggagcgttacctggtatggtgtggcaggatcgagacgtgtacctgcagggacccatttgggccaagattcctcacaccgatggacactttcatccttctccactggtgggaggttttggactcaaacacccgcctcctcagatcatgatcaaaaacactcccgttccagccaatcctcctacaaacttcagttctgccaagtttgcttccttcatcacacagtattccacaggacaagtcagcgtggagattgagtgggagctgcagaaggagaacagcaaacgctggaaccccgagatccagtacacttccaactacaacaaatctgttaatgtggactttactgtggacactaatggcgtgtattcagagcctcgccccattggcaccagatacctgactcgtaatctgtaa

SEQ ID NO: 4381 - DNA, 2208 bp, Artificial Sequence
  Description of Artificial Sequence: Synthetic polynucleotide
atggctgccgatggttatcttccagattggctcgaggacactctctctgaaggaataagacagtggtggaagctcaaacctggcccaccaccgccaaagcccgcagagcggcacaaggacgacagtaggggtcttgtgcttcctgggtacaagtacctcggacccttcaacggactcgacaaaggagagccggtcaacgaggcagacgccgcggccctcgagcacgacaaggcctacgaccggcagctcgacagcggagacaacccgtacctcaagtacaaccacgccgacgcggagtttcaggagcgtcttaaagaagatacgtcttttgggggcaacctcggacgagcagtattccaggcgaaaaagagggttcttgaacctctgggcctggttgaggagcctgttaagacggctccgggaaaaaagaggccggtagagcactctcctgtggagccagactcctcctcgggaaccggaaaagcgggccagcagcctgcaagaaaaagattgaattttggtcagactggagacgcagactccgtacctgacccccagcctctcggacagccaccagcagcccccacaagtttgggatctactacaatggctacaggcagtggcgcaccaatggcagacaataacgagggtgccgatggagtgggtaattcctcaggaaattggcattgcgattcccaatggctgggcgacagagtcatcaccaccagcacccgaacctgggccctgcccacctacaacaaccacctctacaagcaaatctccagccaatcaggagcatcgaacgacaaccactactttggctacagcaccccttgggggtattttgacttcaacagattccactgtcacttctccccacgtgactggcaaagactcatcaacaacaactggggattccgacccaagagactcaacttcaagctctttaacattcaagtcaaagaggtcacgcagaatgacggtacgacgacgattgccaataaccttaccagcacggttcaggtgtttactgactcggagtaccagctcccgtacgtcctcggctcggcgcatcaaggatgcctcccgccgttcccagcagacgtcttcatggtcccacagtatggatacctcaccctgaacaacgggagtcaggcggtaggacgctcttccttttactgcctggagtactttccttctcagatgcttcgtaccggaaacaactttaccttcagctacacctttgaagacgtgcctttccacagtagctacgctcacagccagagtctggatcggctgatgaatcctcttatcgaccagtacctgtattatctaaacaaaacacaatcaaatagtggaactcttcagcagtctcggctactgtttagtcaagctggacccaccagcatgtctcttcaagctaaaaactggctgcctggaccttgctacagacaacagcgtctgtcaaagcaggcaaacgacaacaacaacagcaactttccctggactgcggctacaaagtatcatctaaatggccgggactcgttggttaatccaggaccagctatggccagccacaaagacgatgaagaaaagtttttccccatgcatggaaccctgatatttggtaaacaaggaacaaatgctaacgacgcggatttggacaatgtcatgattacagatgaagaagaaatccgcaccaccaatcccgtggctacggagcagtacgggactgtgtcaaataatttgcaaaactcaaatactggtccaactactggaactgtcaatcaccaaggagcgttacctggtatggtgtggcaggatcgagacgtgtacctgcagggacccatttgggccaagattcctcacaccgatggacactttcatccttctccactgatgggaggttttggactcaaacacccgcctcctcagatcatgatcaaaaacactcccgttccagccaatcctcctacaaacttcagttctgccaagtttgcttccttcatcacacagtattccacaggacaagtcggcgtggagattgagtgggagctgcagaaggagaacagcaaacgctggaaccccgagatccagtacacttccaactacaacaaatctgttaatgtggactttactgtggacactaatggcgtgtattcagagcctcgccccattggcaccagatacctgactcgtaatctgtaa

SEQ ID NO: 4382 - DNA, 2208 bp, Artificial Sequence
  Description of Artificial Sequence: Synthetic polynucleotide
atggctgccgatggttatcttccagattggctcgaggacactctctctgaaggaataagacagtggtggaagctcaaacctggcccaccaccgccaaagcccgcagagcggcacaaggacgacagtaggggtcttgtgcttcctgggtacaagtacctcggacccttcaacggactcgacaaaggagagccggtcaacgaggcagacgccgcggccctcgagcacgacaaggcctacgaccggcagctcgacagcggagacaacccgtacctcaagtacaaccacgccgacgcggagtttcaggagcgtcttaaagaagatacgtcttttgggggcaacctcggacgagcagtattccaggcgaaaaagagggttcttgaacctctgggcctggttgaggagcctgttaagacggctccgggaaaaaagaggccggtagagcactctcctgtggagccagactcctcctcgggaaccggaaaagcgggccagcagcctgcaagaaaaagattgaattttggtcagactggagacgcagactccgtacctgacccccagcctctcggacagccaccagcagcccccacaagtttgggatctactacaatggctacaggcagtggcgcaccaatggcagacaataacgagggtgccgatggagtgggtaattcctcaggaaattggcattgcgattcccaatggctgggcgacagagtcatcaccaccagcacccgaacctgggccctgcccacctacaacaaccacctctacaagcaaatctccagccaatcaggagcatcgaacgacaaccactactttggctacagcaccccttgggggtattttgacttcaacagattccactgtcacttctccccacgtgactggcaaagactcatcaacaacaactggggattccgacccaagagactcaacttcaagctctttaacattcaagtcaaagaggtcacgcagaatgacggtacgacgacgattgccaataaccttaccagcacggttcaggtgtttactgactcggagtaccagcccccgtacgtcctcggctcggcgcatcaaggatgcctcccgccgttcccagcagacgtcttcatggtcccacagtatggatacctcaccctgaacaacgggagtcaggcggtaggacgctcttccttttactgcctggagtactttccttctcagatgcttcgtaccggaaacaactttaccttcagctacacctttgaagacgtgcctttccacagtagctacgctcacagccagagtctggatcggctgatgaatcctcttatcgaccagtacctgtattatctaaacaaaacacaatcaaatagtggaactcttcagcagtctcggctactgtttagtcaagctggacccaccagcatgtctcttcaagctaaaaactggctgcctggaccttgctacagacaacagcgtctgtcaaagcaggcaaacgacaacaacaacagcaactttccctggactgcggctacaaagtatcatctaaatggccgggactcgttggttaatccaggaccagctatggccagccacaaagacgatgaagaaaagtttttccccatgcatggaaccctgatatttggtaaacaaggaacaaatgctaacgacgcggatttggacaatgtcatgattacagatgaagaagaaatccgcaccaccaatcccgtggctacggagcagtacgggactgtgtcaaataatttgcaaaactcaaatactggtccaactactggaactgtcaatcaccaaggagcgttacctggtatggtgtggcaggatcgagacgtgtacctgcagggacccatttgggccaagattcctcacaccgatggacactttcatccttctccactgatgggaggttttggactcaaacacccgcctcctcagatcatgatcaaaaacactcccgttccagccaatcctcctacaaacttcagttctgccaagtttgcttccttcatcacacagtattccacgggacaagtcagcgtggagattgagtgggagctgcagaaggagaacagcaaacgctggaaccccgagatccagtacacttccaactacaacaaatctgttaatgtggactttactgtggacactaatggcgtgtattcagagcctcgccccattggcaccagatacctgactcgtaatctgtaa

SEQ ID NO: 4383 - DNA, 2208 bp, Artificial Sequence
  Description of Artificial Sequence: Synthetic polynucleotide
atggctgccgatggttatcttccagattggctcgaggacactctctctgaaggaataagacagtggtggaagctcaaacctggcccaccaccgccaaagcccgcagagcggcacaaggacgacagtaggggtcttgtgcttcctgggtacaagtacctcggacccttcaacggactcgacaaaggagagccggtcaacgaggcagacgccgcggccctcgagcacgacaaggcctacgaccggcagctcgacagcggagacaacccgtacctcaagtacaaccacgccgacgcggagtttcaggagcgtcttaaagaagatacgtcttttgggggcaacctcggacgagcagtattccaggcgaaaaagagggttcttgaacctctgggcctggttgaggagcctgttaagacggctccgggaaaaaagaggccggtagagcactctcctgtggagccagactcctcctcgggaaccggaaaagcgggccagcagcctgcaagaaaaagattgaattttggtcagactggagacgcagactccgtacctgacccccagcctctcggacagccaccagcagcccccacaagtttgggatctactacaatggctacaggcagtggcgcaccaatggcagacaatgacgagggtgccgatggagtgggtaattcctcaggaaattggcattgcgattcccaatggctgggcgacagagtcatcaccaccagcacccgaacctgggccctgcccacctacaacaaccacctctacaagcaaatctccagccaatcaggagcatcgaacgacaaccactactttggctacagcaccccttgggggtattttgacttcaacagattccactgtcacttctccccacgtgactggcaaagactcatcaacaacaactggggattccgacccaagagactcaacttcaagctctttaacattcaagtcaaagaggtcacgcagaatgacggtacgacgacgattgccaataaccttaccagcacggttcaggtgtttactgactcggagtaccagctcccgtacgtcctcggctcggcgcatcaaggatgcctcccgccgttcccagcagacgtcttcatggtcccacagtatggatacctcaccctgaacaacgggagtcaggcggtaggacgctcttccttttactgcctggagtactttccttctcagatgcttcgtaccggaaacaactttaccttcagctacacctttgaagacgtgcctttccacagtagctacgctcacagccagagtctggatcggctgatgaatcctcttatcgaccagtacctgtattatctaaacaaaacacaatcaaatagtggaactcttcagcagtctcggctactgtttagtcaagctggacccaccagcatgtctcttcaagctaaaaactggctgcctggaccttgctacagacaacagcgtctgtcaaagcaggcaaacgacaacaacaacagcaactttccctggactgcggctacaaagtatcatctaaatggccgggactcgttggttaatccaggaccagctatggccagccacaaagacgatgaagaaaagtttttccccatgcatggaaccctgatatttggtaaacaaggaacaaatgctaacgacgcggatttggacaatgtcatgattacagatgaagaagaaatccgcaccaccaatcccgtggctacggagcagtacgggactgtgtcaaataatttgcaaaactcaaatactggtccaactactggaactgtcaatcaccaaggagcgttacctggtatggtgtggcaggatcgagacgtgtacctgcagggacccatttgggccaagattcctcacaccgatggacactttcatccttctccactgatgggaggttttggactcaaacacccgcctcctcagatcatgatcaaaaacactcccgttccagccaatcctcctacaaacttcagttctgccaagtttgcttccttcatcacacagtattccacaggacaagtcagcgtggagattgagtgggagctgcagaaggagaacagcaaacgctggaaccccgagatccagtacacttccaactacaacaaatctgttaatgtggactttactgtggacactaatggcgtgtattcagagcctcgccccattggcaccagatacctgactcgtaatctgtaa

SEQ ID NO: 4384 - DNA, 2208 bp, Artificial Sequence
  Description of Artificial Sequence: Synthetic polynucleotide
atggctgccgatggttatcttccagattggctcgaggacactctctctgaaggaataagacagtggtggaagctcaaacctggcccaccaccgccaaagcccgcagagcggcacaaggacgacagtaggggtcttgtgcttcctgggtacaagtacctcggacccttcaacggactcgacaaaggagagccggtcaacgaggcagacgccgcggccctcgagcacgacaaggcctacgaccggcagctcgacagcggagacaacccgtacctcaagtacaaccacgccgacgcggagtttcaggagcgtcttaaagaagatacgtcttttgggggcaacctcggacgagcagtattccaggcgaaaaagagggttcttgaacctctgggcctggttgaggagcctgttaagacggctccgggaaaaaagaggccggtagagcactctcctgtggagccagactcctcctcgggaaccggaaaagcgggccagcagcctgcaagaaaaagattgaattttggtcagactggagacgcagactccgtacctgacccccagcctctcggacagccaccagcagcccccacaagtttgggatctactacaatggctacaggcagtggcgcaccaatggcagacaataacgagggtgccgatggagtgggtaattcctcaggaaattggcattgcgattcccaatggctgggcgacagagtcatcaccaccagcacccgaacctgggccctgcccacctacaacaaccacctctacaagcaaatctccagccaatcaggagcatcgaacgacaaccactactttggctacagcaccccttgggggtattttgacttcaacagattccactgtcacttctccccacgtgactggcaaagactcatcaacaacaactggggattccgacccaagagactcaacttcaagctctttaacattcaagtcaaagaggtcacgcagaatgacggtacgacgacgattgccaataaccttaccagcacggttcaggtgtttactgactcggagtaccagctcccgtacgtcctcggctcggcgcatcaaggatgcctcccgccgttcccagcagacgtcttcatggtcccacagtatggatacctcaccctgaacaacgggagtcaggcggtaggacgctcttccttttactgcctggagtactttccttctcagatgcttcgtaccggaaacaactttaccttcagctacacctttgaagacgtgcctttccacagtagctacgctcacagccagagtctggatcggctgatgaatcctcttatcgaccagtacctgtattatctaaacaaaacacaatcaaatagtggaactcttcagcagtctcggctactgtttagtcaagctggacccaccagcatgtctcttcaagctaaaaactggctgcctggaccttgctacagacaacagcgtctgccaaagcaggcaaacgacaacaacaacagcaactttccctggactgcggctacaaagtatcatctaaatggccgggactcgttggttaatccaggaccagctatggccagccacaaagacgatgaagaaaagtttttccccatgcatggaaccctgatatttggtaaacaaggaacaaatgctaacgacgcggatttggacaatgtcatgattacagatgaagaagaaatccgcaccaccaatcccgtggctacggagcagtacgggactgtgtcaaataatttgcaaaactcaaatactggtccaactactggaactgtcaatcaccaaggagcgttacctggtatggtgtggcaggatcgagacgtgtacctgcagggacccatttgggccaagattcctcacaccgatggacactttcatccttctccactgatgggaggttttggactcaaacacccgcctcctcagatcatgatcaaaaacactcccgttccagccaatcctcctacaaacttcagttctgccaagtttgcttccttcatcacacagtattccacgggacaagtcagcgtggagattgagtgggagctgcagaaggagaacagcaaacgctggaaccccgagatccagtacacttccaactacaacaaatctgttaatgtggactttactgtggacactaatggcgtgtattcagagcctcgccccattggcaccagatacctgactcgtaatctgtaa

SEQ ID NO: 4385 - DNA, 2208 bp, Artificial Sequence
  Description of Artificial Sequence: Synthetic polynucleotide
atggctgccgatggttatcttccagattggctcgaggacactctctctgaaggaataagacagtggtggaagctcaaacctggcccaccaccgccaaagcccgcagagcggcacaaggacgacagtaggggtcttgtgcttcctgggtacaagtacctcggacccttcaacggactcgacaaaggagagccggtcaacgaggcagacgccgcggccctcgagcacgacaaggcctacgaccggcagctcgacagcggagacaacccgtacctcaagtacaaccacgccgacgcggagtttcaggagcgtcttaaagaagatacgtcttttgggggcaacctcggacgagcagtattccaggcgaaaaagagggttcttgaacctctgggcctggttgaggagcctgttaagacggctccgggaaaaaagaggccggtagagcactctcctgtggagccagactcctcctcgggaaccggaaaagcgggccagcagcctgcaagaaaaagattgaattttggtcagactggagacgcagactccgtacctgacccccagcctctcggacagccaccagcagcccccacaagtttgggatctactacaatggctacaggcagtggcgcaccaatggcagacaataacgagggtgccgatggagtgggtaattcctcaggaaattggcattgcgattcccaatggctgggcgacagagtcatcaccaccagcacccgaacctgggccctgcccacctacaacaaccacctctacaagcaaatctccagccaatcaggagcatcgaacgacaaccactactttggctacagcaccccttgggggtattttgacttcaacagattccactgtcacttctccccacgtgactggcaaagactcatcaacaacaactggggattccgacccaagagactcaacttcaagctctttaacattcaagtcaaagaggtcacgcagaatgacggtacgacgacgattgccaataaccttaccagcacggttcaggtgtttactgactcggagtaccagctcccgtacgtcctcggctcggcgcatcaaggatgcctcccgccgttcccagcagacgtcttcatggtcccacagtatggatacctcaccctgaacaacgggagtcaggcggtaggacgctcttccttttactgcctggagtactttccttctcagatgcttcgtaccggaaacaactttaccttcagctacacctttgaagacgtgcctttccacagtagctacgctcacagccagagtctggatcggctgatgaatcctcttatcgaccagtacctgtattatctaaacaaaacacaatcaaatagtggaactcttcagcagtctcggctactgtttagtcaagctggacccaccagcatgtctcttcaagctaaaaactggctgcctggaccttgctacagacaacagcgtctgtcaaagcaggcaaacgacaacaacaacagcaactttccctggactgcggctacaaagtatcatctaaatggccgggactcgttggttaatccaggaccagctatggccagccacaaagacgatgaagaaaagtttttccccatgcatggaaccctgatatttggtaaacaaggaacaaatgctaacgacgcggatttggacaatgtcatgattacagatgaagaagaaatccgcaccaccaatcccgtggctacggagcagtacgggactgtgtcaaataatttgcaaaactcaaatactggtccaactactggaactgtcaatcaccaaggagcgttacctggtatggtgtggcaggatcgagacgtgtacctgcagggacccatttgggccaagattcctcacaccgatggacactttcatccttctccactgatgggaggttttggactcaaacacccgcctcctcagatcatgatcaaaaacactcccgttccagccaatcctcctacaaacctcagttctgccaagtttgcttccttcatcacacagtattccacgggacaagtcagcgtggagattgagtgggagctgcagaaggagaacagcaaacgctggaaccccgagatccagtacacttccaactacaacaaatctgttaatgtggactttactgtggacactaatggcgtgtattcagagcctcgccccattggcaccagatacctgactcgtaatctgtaa

SEQ ID NO: 4386 - DNA, 2208 bp, Artificial Sequence
  Description of Artificial Sequence: Synthetic polynucleotide
atggctgccgatggttatcttccagattggctcgaggacactctctctgaaggaataagacagtggtggaagctcaaacctggcccaccaccgccaaagcccgcagagcggcacaaggacgacagtaggggtcttgtgcttcctgggtacaagtacctcggacccttcaacggactcgacaaaggagagccggtcaacgaggcagacgccgcggccctcgagcacgacaaggcctacgaccggcagctcgacagcggagacaacccgtacctcaagtacaaccacgccgacgcggagtttcaggagcgtcttaaagaagatacgtcttttgggggcaacctcggacgagcagtattccaggcgaaaaagagggttcttgaacctctgggcctggttgaggagcctgttaagacggctccgggaaaaaagaggccggtagagcactctcctgtggagccagactcctcctcgggaaccggaaaagcgggccagcagcctgcaagaaaaagattgaattttggtcagactggagacgcagactccgtacctgacccccagcctctcggacagccaccagcagcccccacaagtttgggatctactacaatggctacaggcagtggcgcaccaatggcagacaataacgagggtgccgatggagtgggtaattcctcaggaaattggcattgcgattcccaatggctgggcgacagagtcatcaccaccagcacccgaacctgggccctgcccacctacaacaaccacctctacaagcaaatctccagccaatcaggagcatcgaacgacaaccactactttggctacagcaccccttgggggtattttgacttcaacagattccactgtcacttctccccacgtgactggcaaagactcatcaacaacaactggggattccgacccaagagactcaacttcaagctctttaacattcaagtcaaagaggtcacgcagaatgacggtacgacgacgattgccaataaccttaccagcacggttcaggtgtttactgactcggagtaccagctcccgtacgtcctcggctcggcgcatcaaggatgcctcccgccgttcccagcagacgtcttcatggtcccacagtatggatacctcaccccgaacaacgggagtcaggcggtaggacgctcttccttttactgcctggagtactttccttctcagatgcttcgtaccggaaacaactttaccttcagctacacctttgaagacgtgcctttccacagtagctacgctcacagccagagtctggatcggctgatgaatcctcttatcgaccagtacctgtattatctaaacaaaacacaatcaaatagtggaactcttcagcagtctcggctactgtttagtcaagctggacccaccagcatgtctcttcaagctaaaaactggctgcctggaccttgctacagacaacagcgtctgtcaaagcaggcaaacgacaacaacaacagcaactttccctggactgcggctacaaagtatcatctaaatggccgggactcgttggttaatccaggaccagctatggccagccacaaagacgatgaagaaaagtttttccccatgcatggaaccctgatatttggtaaacaaggaacaaatgctaacgacgcggatttggacaatgtcatgattacagatgaagaagaaatccgcaccaccaatcccgtggctacggagcagtacgggactgtgtcaaataatttgcaaaactcaaatactggtccaactactggaactgtcaatcaccaaggagcgttacctggtatggtgtggcaggatcgagacgtgtacctgcagggacccatttgggccaagattcctcacaccgatggacactttcatccttctccactgatgggaggttttggactcaaacacccgcctcctcagatcatgatcaaaaacactcccgttccagccaatcctcctacaaacttcagttctgccaagtttgcttccttcatcacacagtattccacaggacaagtcagcgtggagattgagtgggagctgcagaaggagaacagcaaacgctggaaccccgagatccagtacacttccaactacaacaaatctgttaatgtggactttactgtggacactaatggcgtgtattcagagcctcgccccattggcaccagatacctgactcgtaatctgtaa

SEQ ID NO: 4387 - DNA, 2208 bp, Artificial Sequence
  Description of Artificial Sequence: Synthetic polynucleotide
atggctgccgatggttatcttccagattggctcgaggacactctctctgaaggaataagacagtggtggaagctcaaacctggcccaccaccgccaaagcccgcagagcggcacaaggacgacagtaggggtcttgtgcttcctgggtacaagtacctcggacccttcaacggactcgacaaaggagagccggtcaacgaggcagacgccgcggccctcgagcacgacaaggcctacgaccggcagctcgacagcggagacaacccgtacctcaagtacaaccacgccgacgcggagtttcaggagcgtcttaaagaagatacgtcttttgggggcaacctcggacgagcagtattccaggcgaaaaagagggttcttgaacctctgggcctggttgaggagcctgttaagacggctccgggaaaaaagaggccggtagagcactctcctgtggagccagactcctcctcgggaaccggaaaagcgggccagcagcctgcaagaaaaagattgaattttggtcagactggagacgcagactccgtacctgacccccagcctctcggacagccaccagcagcccccacaagtttgggatctactacaatggctacaggcagtggcgcaccaatggcagacaataacgagggtgccgatggagtgggtaattcctcaggaaattggcattgcgattcccaatggctgggcgacagagtcatcaccaccagcacccgaacctgggccctgcccacctacaacaaccacctctacaagcaaatctccagccaatcaggagcatcgaacgacaaccactactttggctacagcaccccttgggggtattttgacttcaacagattccactgtcacttctccccacgtgactggcaaagactcatcaacaacaactggggattccgacccaagagactcaacttcaagctctttaacattcaagtcaaagaggtcacgcagaatgacggtacgacgacgattgccaataaccttaccagcacggttcaggtgtttactgactcggagtaccagctcccgtacgtcctcggctcggcgcatcaaggatgcctcccgccgttcccagcagacgtcttcatggtcccacagtatggatacctcaccctgaacaacgggagtcaggcggtaggacgctcttccttttactgcctggagtactttccttctcagatgcttcgtaccggaaacaactttaccttcagctacacctttgaagacgtgcctttccacagtagctacgctcacagccagagtctggatcggctgatgaatcctcttatcgaccagtacctgtattatctaaacaaaacacaatcaaatagtggaactcttcggcagtctcggctactgtttagtcaagctggacccaccagcatgtctcttcaagctaaaaactggctgcctggaccttgctacagacaacagcgtctgtcaaagcaggcaaacgacaacaacaacagcaactttccctggactgcggctacaaagtatcatctaaatggccgggactcgttggttaatccaggaccagctatggccagccacaaagacgatgaaggaaagtttttccccatgcatggaaccctgatatttggtaaacaaggaacaaatgctaacgacgcggatttggacaatgtcatgattacagatgaagaagaaatccgcaccaccaatcccgtggctacggagcagtacgggactgtgtcaaataatttgcaaaactcaaatactggtccaactactggaactgtcaatcaccaaggagcgttacctggtatggtgtggcaggatcgagacgtgtacctgcagggacccatttgggccaagattcctcacaccgatggacactttcatccttctccactgatgggaggttttggactcaaacacccgcctcctcagatcatgatcaaaaacactcccgttccagccaatcctcctacaaacttcagttctgccaagtttgcttccttcatcacacagtattccacaggacaagtcagcgtggagattgagtgggagctgcagaaggagaacagcaaacgctggaaccccgagatccagtacacttccaactacaacaaatctgttaatgtggactttactgtggacactaatggcgtgtattcagagcctcgccccattggcaccagatacctgactcgtaatctgtaa

SEQ ID NO: 4388 - DNA, 2208 bp, Artificial Sequence
  Description of Artificial Sequence: Synthetic polynucleotide
atggctgccgatggttatcttccagattggctcgaggacactctctctgaaggaataagacagtggtggaagctcaaacctggcccaccaccgccaaagcccgcagagcggcacaaggacgacagtaggggtcttgtgcttcctgggtacaagtacctcggacccttcaacggactcgacaaaggagagccggtcaacgaggcagacgccgcggccctcgagcacgacaaggcctacgaccggcagctcgacagcggagacaacccgtacctcaagtacaaccacgccgacgcggagtttcaggagcgtcttaaagaagatacgtcttttgggggcaacctcggacgagcagtattccaggcgaaaaagagggttcttgaacctctgggcctggttgaggagcctgttaagacggctccgggaaaaaagaggccggtagagcactctcctgtggagccagactcctcctcgggaaccggaaaagcgggccagcagcctgcaagaaaaagattgaattttggtcagactggagacgcagactccgtacctgacccccagcctctcggacagccaccagcagcccccacaagtttgggatctactacaatggctacaggcagtggcgcaccaatggcagacaataacgagggtgccgatggagtgggtaattcctcaggaaattggcattgcgattcccaatggctgggcgacagagtcatcaccaccagcacccgaacctgggccctgcccacctacaacaaccacctctacaagcaaatctccagccaatcaggagcatcgaacgacaaccactactttggctacagcaccccttgggggtattttgacttcaacagattccactgtcacttctccccacgtgactggcaaagactcatcaacaacaactggggattccgacccaagagactcaacttcaagctctttaacattcaagtcaaagaggtcacgcagaatgacggtacgacgacgattgccaataaccttaccagcacggttcaggtgtttactgactcggagtaccagctcccgtacgtcctcggctcggcgcatcaaggatgcctcccgccgttcccagcagacgtcttcatggtcccacagtatggatacctcaccctgaacaacgggagtcaggcggtaggacgctcttccttttactgcctggagtactttccttctcagatgcttcgtaccggaaacaactttaccttcagctacacctttgaagacgtgcctttccacagtagctacgctcacagccagagtctggatcggctgatgaatcctcttatcgaccagtacctgtattatctaaacaaaacacaatcaaatagtggaactcttcagcagtctcggctactgtttagtcaagctggacccaccagcatgtctcttcaagctaaaaactggctgcctggaccttgctacagacaacagcgtctgtcaaagcaggcaaacgacaacaacaacagcaactttccctggactgcggctacaaagtatcatctaaatggccgggactcgttggttaatccaggaccagctatggccagccacaaagacgatgaagaaaagtttttccccatgcatggaaccctgatatttggtaaacaaggaacaaatgctaacgacgcggatttggacaatgccatgattacagatgaagaagaaatccgcaccaccaatcccgtggctacggagcagtacgggactgtgtcaaataatttgcaaaactcaaatactggtccaactactggaactgtcaatcaccaaggagcgttacctggtatggtgtggcaggatcgagacgtgtacctgcagggacccatttgggccaagattcctcacaccgatggacactttcatccttctccactgatgggaggttttggactcaaacacccgcctcctcagatcatgatcaaaaacactcccgttccagccaatcctcctacaaacttcagttctgccaagtttgcttccttcatcacacagtattccacaggacaagtcagcgtggagattgagtgggagctgcagaaggagaacagcaaacgctggaaccccgagatccagtacacttccaactacaacaaatctgttaatgtggactttactgtggacactaatggcgtgtattcagagcctcgccccattggcaccagatacctgactcgtaatctgtaa

SEQ ID NO: 4389 - DNA, 2208 bp, Artificial Sequence
  Description of Artificial Sequence: Synthetic polynucleotide
atggctgccgatggttatcttccagattggctcgaggacactctctctgaaggaataagacagtggtggaagctcaaacctggcccaccaccgccaaagcccgcagagcggcacaaggacgacagtaggggtcttgtgcttcctgggtacaagtacctcggacccttcaacggactcgacaaaggagagccggtcaacgaggcagacgccgcggccctcgagcacgacaaggcctacgaccggcagctcgacagcggagacaacccgtacctcaagtacaaccacgccgacgcggagtttcaggagcgtcttaaagaagatacgtcttttgggggcaacctcggacgagcagtattccaggcgaaaaagagggttcttgaacctctgggcctggttgaggagcctgttaagacggctccgggaaaaaagaggccggtagagcactctcctgtggagccagactcctcctcgggaaccggaaaagcgggccagcagcctgcaagaaaaagattgaattttggtcagactggagacgcagactccgtacctgacccccagcctctcggacagccaccagcagcccccacaagtttgggatctactacaatggctacaggcagtggcgcaccaatggcaggcaataacgagggtgccgatggagtgggtaattcctcaggaaattggcattgcgattcccaatggctgggcgacagagtcatcaccaccagcacccgaacctgggccctgcccacctacaacaaccacctctacaagcaaatctccagccaatcaggagcatcgaacgacaaccactactttggctacagcaccccttgggggtattttgacttcaacagattccactgtcacttctccccacgtgactggcaaagactcatcaacaacaactggggattccgacccaagagactcaacttcaagctctttaacattcaagtcaaagaggtcacgcagaatgacggtacgacgacgattgccaataaccttaccagcacggttcaggtgtttactgactcggagtaccagctcccgtacgtcctcggctcggcgcatcaaggatgcctcccgccgttcccagcagacgtcttcatggtcccacagtatggatacctcaccctgaacaacgggagtcaggcggtaggacgctcttccttttactgcctggagtactttccttctcagatgcttcgtaccggaaacaactttaccttcagctacacctttgaagacgtgcctttccacagtagctacgctcacagccagagtctggatcggctgatgaatcctcttatcgaccagtacctgtattatctaaacaaaacacaatcaaatagtggaactcttcagcagtctcggctactgtttagtcaagctggacccaccagcatgtctcttcaagctaaaaactggctgcctggaccttgctacagacaacagcgtctgtcaaagcaggcaaacgacaacaacaacagcaactttccctggactgcggctacaaagtatcatctaaatggccgggactcgttggttaatccaggaccagctatggccagccacaaagacgatgaagaaaagtttttccccatgcatggaaccctgatatttggtaaacaaggaacaaatgctaacgacgcggatttggacaatgtcatgattacagatgaagaagaaatccgcaccaccaatcccgtggctacggagcagtacgggactgtgtcaaataatttgcaaaactcaaatactggtccaactactggaactgtcaatcaccaaggagcgttacctggtatggtgtggcaggatcgagacgtgtacctgcagggacccatttgggccaagattcctcacaccgatggacactttcatccttctccactgatgggaggttttggactcaaacacccgcctcctcagatcatgatcaaaaacactcccgttccagccaatcctcctacaaacttcagttctgccaagtttgcttccttcatcacacagtattccacaggacaagtcagcgtggagattgagtgggagctgcagaaggagaacagcaaacgctggaaccccgagatccagtacacttccaactacaacaaatctgttaatgtggactttactgtggacactaatggcgtgtattcagagcctcgccccattggcaccagatacctgactcgtaatctgtaa

SEQ ID NO: 4390 - DNA, 2208 bp, Artificial Sequence
  Description of Artificial Sequence: Synthetic polynucleotide
atggctgccgatggttatcttccagattggctcgaggacactctctctgaaggaataagacagtggtggaagctcaaacctggcccaccaccgccaaagcccgcagagcggcacaaggacgacagtaggggtcttgtgcttcctgggtacaagtacctcggacccttcaacggactcgacaaaggagagccggtcaacgaggcagacgccgcggccctcgagcacgacaaggcctacgaccggcagctcgacagcggagacaacccgtacctcaagtacaaccacgccgacgcggagtttcaggagcgtcttaaagaagatacgtcttttgggggcaacctcggacgagcagtattccaggcgaaaaagagggttcttgaacctctgggcctggttgaggagcctgttaagacggctccgggaaaaaagaggccggtagagcactctcctgtggagccagactcctcctcgggaaccggaaaagcgggccagcagcctgcaagaaaaagattgaattttggtcagactggagacgcagactccgtacctgacccccagcctctcggacagccaccagcagcccccacaagtttgggatctactacaatggctacaggcagtggcgcaccaatggcagacaataacgagggtgccgatggagtgggtaattcctcaggaaattggcattgcgattcccaatggctgggcgacagagtcatcaccaccagcacccgaacctgggccctgcccacctacaacaaccacctctacaagcaaatctccagccaatcaggagcatcgaacgacaaccactactttggctacagcaccccttgggggtattttgacttcaacagattccactgtcacttctccccacgtgactggcaaagactcatcaacaacaactggggattccgacccaagagactcaacttcaagctctttaacattcaagtcaaagaggtcgcgcagaatgacggtacgacgacgattgccaataaccttaccagcacggttcaggtgtttactgactcggagtaccagctcccgtacgtcctcggctcggcgcatcaaggatgcctcccgccgttcccagcagacgtcttcatggtcccacagtatggatacctcaccctgaacaacgggagtcaggcggtaggacgctcttccttttactgcctggagtactttccttctcagatgcttcgtaccggaaacaactttaccttcagctacacctttgaagacgtgcctttccacagtagctacgctcacagccagagtctggatcggctgatgaatcctcttatcgaccagtacctgtattatctaaacaaaacacaatcaaatagtggaactcttcagcagtctcggctactgtttagtcaagctggacccaccagcatgtctcttcaagctaaaaactggctgcctggaccttgctacagacaacagcgtctgtcaaagcaggcaaacgacaacaacaacagcaactttccctggactgcggctacaaagtatcatctaaatggccgggactcgttggttaatccaggaccagctatggccagccacaaagacgatgaagaaaagtttttccccatgcatggaaccctgatatttggtaaacaaggaacaaatgctaacgacgcggatttggacaatgtcatgattacagatgaagaagaaatccgcaccaccaatcccgtggctacggagcagtacgggactgtgtcaaataatttgcaaaactcaaatactggtccaactactggaactgtcaatcaccaaggagcgttacctggtatggtgtggcaggatcgagacgtgtacctgcagggacccatttgggccaagattcctcacaccgatggacactttcatccttctccactgatgggaggttttggactcaaacacccgcctcctcagatcatgatcaaaaacactcccgttccagccaatcctcctacaaacttcagttctgccaagtttgcttccttcatcacacagtattccacaggacaagtcagcgtggagattgagtgggagctgcagaaggagaacagcaaacgctggaaccccgagatccagtacacttccaactacaacaaatctgttaatgtggactttactgtggacactaatggcgtgtattcagagcctcgccccattggcaccagatacctgactcgtaatctgtaa

SEQ ID NO: 4391 - DNA, 2208 bp, Artificial Sequence
  Description of Artificial Sequence: Synthetic polynucleotide
atggctgccgatggttatcttccagattggctcgaggacactctctctgaaggaataagacagtggtggaagctcaaacctggcccaccaccgccaaagcccgcagagcggcacaaggacgacagtaggggtcttgtgcttcctgggtacaagcacctcggacccttcaacggactcgacaaaggagagccggtcaacgaggcagacgccgcggccctcgagcacgacaaggcctacgaccggcagctcgacagcggagacaacccgtacctcaagtacaaccacgccgacgcggagtttcaggagcgtcttaaagaagatacgtcttttgggggcaacctcggacgagcagtattccaggcgaaaaagagggttcttgaacctctgggcctggttgaggagcctgttaagacggctccgggaaaaaagaggccggtagagcactctcctgtggagccagactcctcctcgggaaccggaaaagcgggccagcagcctgcaagaaaaagattgaattttggtcagactggagacgcagactccgtacctgacccccagcctctcggacagccaccagcagcccccacaagtttgggatctactacaatggctacaggcagtggcgcaccaatggcagacaataacgagggtgccgatggagtgggtaattcctcaggaaattggcattgcgattcccaatggctgggcgacagagtcatcaccaccagcacccgaacctgggccctgcccacctacaacaaccacctctacaagcaaatctccagccaatcaggagcatcgaacgacaaccactactttggctacagcaccccttgggggtattttgacttcaacagattccactgtcacttctccccacgtgactggcaaagactcatcaacaacaactggggattccgacccaagagactcaacttcaagctctttaacattcaagtcaaagaggtcacgcagaatgacggtacgacgacgattgccaataaccttaccagcacggttcaggtgtttactgactcggagtaccagctcccgtacgtcctcggctcggcgcatcaaggatgcctcccgccgttcccagcagacgtcttcatggtcccacagtatggatacctcaccctgaacaacgggagtcaggcggtaggacgctcttccttttactgcctggagtactttccttctcagatgcttcgtaccggaaacaactttaccttcagctacacctttgaagacgtgcctttccacagtagctacgctcacagccagagtctggatcggctgatgaatcctcttatcgaccagtacctgtattatctaaacaaaacacaatcaaatagtggaactcttcagcagtctcggctactgtttagtcaagctggacccaccagcatgtctcttcaagctaaaaactggctgcctggaccttgctacagacaacagcgtctgtcaaagcaggcaaacgacaacaacaacagcaactttccctggactgcggctacaaagtatcatctaaatggccgggactcgttggttaatccaggaccagctatggccagccacaaagacgatgaagaaaagtttttccccatgcatggaaccctgatatttggtaaacaaggaacaaatgctaacgacgcggatttggacaatgtcatgattacagatgaagaagaaatccgcaccaccaatcccgtggctacggagcagtacgggactgtgtcaaataatttgcaaaactcaaatactggtccaactactggaactgtcaatcaccaaggagcgttacctggtatggtgtggcaggatcgagacgtgtacctgcagggacccatttgggccaagattcctcacaccgatggacactttcatccttctccactgatgggaggttttggactcaaacacccgcctcctcagatcatgatcaaaaacactcccgttccagccaatcctcctacaaacttcagttctgccaagtttgcttccttcatcacacagtattccacaggacaagtcagcgtggagattgagtgggagctgcagaaggagaacagcaaacgctggaaccccgagatccagtacacttccaactacaacaaatctgttaatgtggactttactgtggacactaatggcgtgtattcagagcctcgccccattggcaccagatacctgactcgtaatctgtaa

SEQ ID NO: 4392 - DNA, 2208 bp, Artificial Sequence
  Description of Artificial Sequence: Synthetic polynucleotide
atggctgccgatggttatcttccagattggcccgaggacactctctctgaaggaataagacagtggtggaagctcaaacctggcccaccaccgccaaagcccgcagagcggcacaaggacgacagtaggggtcttgtgcttcctgggtacaagtacctcggacccttcaacggactcgacaaaggagagccggtcaacgaggcagacgccgcggccctcgagcacgacaaggcctacgaccggcagctcgacagcggagacaacccgtacctcaagtacaaccacgccgacgcggagtttcaggagcgtcttaaagaagatacgtcttttgggggcaacctcggacgagcagtattccaggcgaaaaagagggttcttgaacctctgggcctggttgaggagcctgttaagacggctccgggaaaaaagaggccggtagagcactctcctgtggagccagactcctcctcgggaaccggaaaagcgggccagcagcctgcaagaaaaagattgaattttggtcagactggagacgcagactccgtacctgacccccagcctctcggacagccaccagcagcccccacaagtttgggatctactacaatggctacaggcagtggcgcaccaatggcagacaataacgagggtgccgatggagtgggtaattcctcaggaaattggcattgcgattcccaatggctgggcgacagagtcatcaccaccagcacccgaacctgggccctgcccacctacaacaaccacctctacaagcaaatctccagccaatcaggagcatcgaacgacaaccactactttggctacagcaccccttgggggtattttgacttcaacagattccactgtcacttctccccacgtgactggcaaagactcatcaacaacaactggggattccgacccaagagactcaacttcaagctctttaacattcaagtcaaagaggtcacgcagaatgacggtacgacgacgattgccaataaccttaccagcacggttcaggtgtttactgactcggagtaccagctcccgtacgtcctcggctcggcgcatcaaggatgcctcccgccgttcccagcagacgtcttcatggtcccacagtatggatacctcaccctgaacaacgggagtcaggcggtaggacgctcttccttttactgcctggagtactttccttctcagatgcttcgtaccggaaacaactttaccttcagctacacctttgaagacgtgcctttccacagtagctacgctcacagccagagtctggatcggctgatgaatcctcttatcgaccagtacctgtattatctaaacaaaacacaatcaaatagtggaactcttcagcagtctcggctactgtttagtcaagctggacccaccagcatgtctcttcaagctaaaaactggctgcctggaccttgctacagacaacagcgtctgtcaaagcaggcaaacgacaacaacaacagcaactttccctggactgcggctacaaagtatcatctaaatggccgggactcgttggttaatccaggaccagctatggccagccacaaagacgatgaagaaaagtttttccccatgcatggaaccctgatatttggtaaacaaggaacaaatgctaacgacgcggatttggacaatgtcatgattacagatgaagaagaaatccgcaccaccaatcccgtggctacggagcagtacgggactgtgtcaaataatttgcaaaactcaaatactggtccaactactggaactgtcaatcaccaaggagcgttacctggtatggtgtggcaggatcgagacgtgtacctgcagggacccatttgggccaagattcctcacaccgatggacactttcatccttctccactgatgggaggttttggactcaaacacccgcctcctcagatcatgatcaaaaacactcccgttccagccaatcctcctacaaacttcagttctgccaagtttgcttccttcatcacacagtattccacaggacaagtcagcgtggagattgagtgggagctgcagaaggagaacagcaaacgctggaaccccgagatccagtacacttccaactacaacaaatctgttaatgtggactttactgtggacactaatggcgtgtattcagagcctcgccccattggcaccagatacctgactcgtaatctgtaa

SEQ ID NO: 4393 - DNA, 2208 bp, Artificial Sequence
  Description of Artificial Sequence: Synthetic polynucleotide
atggctgccgatggttatcttccagattggctcgaggacactctctctgaaggaataagacagtggtggaagctcaaacctggcccaccaccgccaaagcccgcagagcggcacaaggacgacagtaggggtcttgtgcttcctgggtacaagtacctcggacccttcaacggactcgacaaaggagagccggtcaacgaggcagacgccgcggccctcgagcacgacaaggcctacgaccggcagctcgacagcggagacaacccgtacctcaagtacaaccacgccgacgcggagtttcaggagcgtcttaaagaagatacgtcttttgggggcaacctcggacgagcagtattccaggcgaaaaagagggttcttgaacctctgggcctggttgaggagcctgttaagacggctccgggaaaaaagaggccggtagagcactctcctgtggagccagactcctcctcgggaaccggaaaagcgggccagcagcctgcaagaaaaagattgaattttggtcagactggagacgcagactccgtacctgacccccagcctctcggacagccaccagcagcccccacaagtttgggatctactacaatggctacaggcagtggcgcaccaatggcagacaataacgagggtgccgatggagtgggtaattcctcaggaaattggcattgcgattcccaatggctgggcgacagagtcatcaccaccagcacccgaacctgggccctgcccacctacaacaaccacctctacaagcaaatctccagccaatcaggagcatcgaacgacaaccactactttggctacagcaccccttgggggtattttgacttcaacagattccactgtcacttctccccacgtgactggcaaagactcatcaacaacaactggggattccgacccaagagactcaacttcaagctctttaacattcaagtcaaagaggtcacgcagaatgacggtacgacgacgattgccaataaccttaccagcacggttcaggtgtttactgactcggagtaccagctcccgtacgtcctcggctcggcgcatcaaggatgcctcccgccgttcccagcagacgtcttcatggtcccacagtatggatacctcaccctgaacaacgggagtcaggcggtaggacgctcttccttttactgcctggagtactttccttctcagatgcttcgtaccggaaacaactttaccttcagctacacctttgaagacgtgcctttccacagtagctacgctcacagccagagtctggatcggctgatgaatcctcttatcgaccagtacctgtattatctaaacaaaacacaatcaaatagtggaactcttcagcagtctcggctactgtttagtcaagctggacccaccagcatgtctcttcaagctaaaaactggctgcctggaccttgctacagacaacagcgtctgtcaaagcaggcaaacgacaacaacaacagcaactttccctggactgcggctacaaagtatcatctaaatggccgggactcgttggttaatccaggaccagctatggccagccacaaagacgatgaagaaaagtttttccccatgcatggaaccctgatatttggtaaacaaggaacaaatgctaacgacgcggatttggacaatgtcatgattacagatgaagaagaaatccgcaccaccaatcccgtggctacggagcagtacgggactgtgtcaaataatttgcaaaactcaaatactggtccaactactggaactgtcaatcaccaaggagcgttacctggtatggtgtggcaggatcgaggcgtgtacctgcagggacccatttgggccaagattcctcacaccgatggacactttcatccttctccactgatgggaggttttggactcaaacacccgcctcctcagatcatgatcaaaaacactcccgttccagccaatcctcctacaaacttcagttctgccaagtttgcttccttcatcacacagtattccacgggacaagtcagcgtggagattgagtgggagctgcagaaggagaacagcaaacgctggaaccccgagatccagtacacttccaactacaacaaatctgttaatgtggactttactgtggacactaatggcgtgtattcagagcctcgccccattggcaccagatacctgactcgtaatctgtaa

SEQ ID NO: 4394 - DNA, 2208 bp, Artificial Sequence
  Description of Artificial Sequence: Synthetic polynucleotide
atggctgccgatggttatcttccagattggctcgaggacactctctctgaaggaataagacagtggtggaagctcaaacctggcccaccaccgccaaagcccgcagagcggcacaaggacgacagtaggggtcttgtgcttcctgggtacaagtacctcggacccttcaacggactcgacaaaggagagccggtcaacgaggcagacgccgcggccctcgagcacgacaaggcctacgaccggcagctcgacagcggagacaacccgtacctcaagtacaaccacgccgacgcggagtttcaggagcgtcttaaagaagatacgtcttttgggggcaacctcggacgagcagtattccaggcgaaaaagagggttcttgaacctctgggcctggttgaggagcctgttaagacggctccgggaaaaaagaggccggtagagcactctcctgtggagccagactcctcctcgggaaccggaaaagcgggccagcagcctgcaagaaaaagattgaattttggtcagactggagacgcagactccgtacctgacccccagcctctcggacagccaccagcagcccccacaagtttgggatctactacaatggctacaggcagtggcgcaccaatggcagacaataacgagggtgccgatggagtgggtaattcctcaggaaattggcattgcgattcccaatggctgggcgacagagtcatcaccaccagcacccgaacctgggccctgcccacctacaacaaccacctctacaagcaaatctccagccaatcaggagcatcgaacgacaaccactactttggctacagcaccccttgggggtattttgacttcaacagattccactgtcacttctccccacgtgactggcaaagactcatcaacaacaactggggattccgacccaagagactcaacttcaagctctttaacattcaagtcaaagaggtcacgcagaatgacggtacgacgacgattgccaataaccttaccagcacggttcaggtgtttactgactcggagtaccagctcccgtacgtcctcggctcggcgcatcaaggatgcctcccgccgttcccagcagacgtcttcatggtcccacagtatggatacctcaccctgaacaacgggagtcaggcggtaggacgctcttccttttactgcctggagtactttccttctcagatgcttcgtaccggaaacaactttaccttcagctacacctttgaagacgtgcctttccacagtagctacgctcacagccagagtctggatcggctgatgaatcctcttatcgaccagtacctgtattatctaaacaaaacacaatcaaatagtggaactcttcagcagtctcggctactgtttagtcaagctggacccaccagcatgtctcttcaagctaaaaactggctgcctggaccttgctacagacaacagcgtctgtcaaagcaggcaaacgacaacaacaacagcaactttccctggactgcggctacaaagtatcatctaaatggccgggactcgttggttaatccaggaccagctatggccagccacaaagacgatgaagaaaagtttttccccatgcatggaaccctgatatttggtaaacaaggaacaaatgctaacgacgcggatttggacaatgtcatgattacagatgaagaagaaatccgcaccaccaatcccgtggctacggagcagtacgggactgtgtcaaataatttgcaaaactcaaatactggtccaactactggaactgtcaatcaccaaggagcgttacctggtatggtgtggcaggatcgagacgtgtacctgcagggacccatttgggccaagattcctcacaccgatggacactttcatccttctccactgatgggaggttttggactcaaacacccgcctcctcagatcatgatcaaaaacactcccgttccagccaatcctcctacaaacttcagttctgccaagtttgcttccttcatcacacagtattccacgggacaagtcagcgtggagattgagtgggagctgcagaaggagaacagcaaacgctggaaccccgagatccagtacacttccaactacaacaaatctgttaatgtggactttactgtgggcactaatggcgtgtattcagagcctcgccccattggcaccagatacctgactcgtaatctgtaa

SEQ ID NO: 4395 - DNA, 2208 bp, Artificial Sequence
  Description of Artificial Sequence: Synthetic polynucleotide
atggctgccgatggttatcttccagattggctcgaggacactctctctgaaggaataagacagtggtggaagctcaaacctggcccaccaccaccaaagcccgcagagcggcatcaggacgacagcaggggtcttgtgcttcctgggtacaagtacctcggacccctcaacggactcgacaaaggagagccggtcaacgaggcagacgctgcggccctcgagcacgacaaggcctacgaccggcagctcgacagcggagacaacccgtacctcaagtacaaccacgccgacgcggagtttcaggagcgtcttaaagaagatacgtcttttgggggcaacctcggacgagcagtcttccaggcgaaaaagagggttcttgaacctctgggcctggttgaggaacctgttaagacggctccgggaaaaaagaggccggtagagcactctcctgcggagccagactcctcctcgggaaccggaaaagcgggccagcagcctgcaagaaagagattgaatttcggtcagactggagacgcagactccgtacctgacccccagcctctcggacagccaccagcagcccccacaagtttgggatctactacaatggctacaggcagtggcgcaccaatggcagacaataacgagggtgccgatggagtgggtaattcctcaggaaattggcattgcgattcccaatggctgggcgacagagtcatcaccaccagcacccgaacctgggccctgcccacctacaacaaccacctctacaagcaaatctccagccaatcaggagcatcgaacgacaaccactactttggctacagcaccccttgggggtattttgacttcaacagattccactgtcacttctccccacgtgactggcaaagactcatcaacaacaactggggattccgacccaagagactcaacttcaagctctttaacattcaagtcaaagaggtcacgcagaatgacggtacgacgacgattgccaataaccttaccagcacggttcaggtgtttactgactcggagtaccagctcccgtacgtcctcggctcggcgcatcaaggatgcctcccgccgtttccagcggacgtcttcatggtcccacagtatggatacctcaccctgaacaacgggagtcaggcggtaggacgctcttccttttactgcctggagtactttccttctcagatgctgcgtaccggaaacaactttaccttcagctacacctttgaggacgtgcctttccacagcagctacgctcacagccagagtttggaccggctgatgaatcctctgatcgaccagtatctgtattatctgaacaggacacaatcaaatagtggaactcttcagcagtctaggctactgtttagccaagctggacccaccagcatgtctcttcaagctaaaaactggctgcctggaccttgctacagacagcagcgtctgtcaaagcaggcaaacgacaacaacaacagcaactttccctggactgcggctacaaagtatcatctaaatggtcgggactcgttggttaatccaggaccagctatggccagccacaaagacgatgaagaaaagtttttccccatgcatggaaccctgatatttggtaaacaaggaacaaatgctaacgacgcggatttggaacatgtcatgattacagatgaagaagaaatcaggaccaccaatcccgtggctacagagcagtacggaaacgtgtcaaataatttgcaaaactcaaatactggtccaactacagaaaatgtcaatcaccagggagcgttacctggtatggtgtggcaggatcgagacgtgtacctgcagggacccatttgggccaagattcctcacaccgacggacactttcacccttctccactgatgggaggttttggactcaaacacccgcctcctcaaatcatgatcaaaaacactcctgttccagccaatcctcctacaaacttcagcgcggcaaagtttgcttccttcatcacacagtattccacgggacaggtcagcgtggagatcgagtgggagctgcagaaggagaacagcaaacgctggaaccccgagatccagtacacttccaactacaacaaatctgttaatgtggactttactgtggacactaatggtgtgtattcagagcctcgccccattggcaccagatacctgactcgtaatctgtaa

SEQ ID NO: 4396 - DNA, 2208 bp, Artificial Sequence
  Description of Artificial Sequence: Synthetic polynucleotide
atggctgccgatggttatcttccagattggctcgaggacactctctctgaaggaataagacagtggtggaagctcaaacctggcccaccaccaccaaagcccgcagagcggcatcaggacgacagcaggggtcttgtgcttcctgggtacaagtacctcggacccttcaacggactcgacaaaggagagccggtcaacgaggcagacgctgcggccctcgagcacgacaaggcctacgaccggcagctcgacagcggagacaacccgtacctcaagtacaaccacgccgacgcggagtttcaggagcgtcttaaagaagatacgtcttttgggggcaacctcggacgagcagtcttccaggcgaaaaagagggttcttgaacctctgggcctggttgaggaacctgttaagacggctccgggaaaaaagaggccggtagagcactctcctgcggagccagactcctcctcgggaaccggaaaagcgggccagcagcctgcaagaaagagattgaatttcggtcagactggagacgcagactccgtacctgacccccagcctctcggacagccaccagcagcccccacaagtttgggatctactacaatggctacaggcagtggcgcaccaatggcagacaataacgagggtgccgatggagtgggtaattcctcaggaaattggcattgcgattcccaatggctgggcgacagagtcatcaccaccagcacccgaacctgggccctgcccacctacaacaaccacctctacaagcaaatctccagccaatcaggagcatcgaacgacaaccactactttggctacagcaccccttgggggtattttgacttcaacagattccactgtcacttctccccacgtgactggcaaagactcatcaacaacaactggggattccgacccaagagactcaacttcaagctctttaacattcaagtcaaagaggtcacgcagaatgacggtacgacgacgattgccaataaccttaccagcacgattcaggtgtttactgactcggagtaccagctcccgtacgtcctcggctcggcgcatcaaggatgcctcccgccgtttccagcggacgtcttcatggtcccacagtatggatacctcaccctgaacaacgggagtcaggcggtaggacgctcttccttttactgcctggagtactttccttctcagatgctgcgtaccggaaacaactttaccttcagctacacctttgaggacgtgcctttccacagcagctacgctcacagccagagtttggaccggctgatgaatcctctgatcgaccagtatctgtattatctgaacaggacacaatcaaatagtggaactcttcagcagtctaggctactgtttagccaagctggacccaccagcatgtctcttcaagctaaaaactggctgcctggaccttgctacagacagcagcgtctgtcaaagcaggcaaacgacaacaacaacagcaactttccctggactgcggctacaaagtatcatctaaatggtcgggactcgttggttaatccaggaccagctatggccagccacaaagacgatgaagaaaagtttttccccatgcatggaaccctgatatttggtaaacaaggaacaaatgctaacgacgcggatttggaacatgtcatgattacagatgaagaagaaatcaggaccaccaatcccgtggctacagagcagtacggaaacgtgtcaaataatttgcaaaactcaaatactggtccaactacagaaaatgtcaatcaccagggagcgttacctggtatggtgtggcaggatcgagacgtgtacctgcagggacccatttgggccaagattcctcacaccgacggacactttcacccttctccactgatgggaggttttggactcaaacacccgcctcctcaaatcatgatcaaaaacactcctgttccagccaatcctcctacaaacttcagcgcggcaaagtttgcttccttcatcacacagtattccacgggacaggtcagcgtggagatcgagtgggagctgcagaaggagaacagcaaacgctggaaccccgagatccagtacacttccaactacaacaaatctgttaatgtggactttactgtggacactaatggtgtgtattcagagcctcgccccattggcaccagatacctgactcgtaatctgtaa

SEQ ID NO: 4397 - DNA, 2208 bp, Artificial Sequence
  Description of Artificial Sequence: Synthetic polynucleotide
atggctgccgatggttatcttccagattggctcgaggacactctctctgaaggaataagacagtggtggaagctcaaacctggcccaccaccaccaaagcccgcagagcggcatcaggacgacagcaggggtcttgtgcttcctgggtacaagtacctcggacccttcaacggactcgacaaaggagagccggtcaacgaggcagacgctgcggccctcgagcacgacaaggcctacgaccggcagctcgacagcggagacaacccgtacctcaagtacaaccacgccgacgcggagtttcaggagcgtcttaaagaagatacgtcttttgggggcaacctcggacgagcagtcttccaggcgaaaaagagggttcttgaacctctgggcctggttgaggaacctgttaagacggctccgggaaaaaagaggccggtagggcactctcctgcggagccagactcctcctcgggaaccggaaaagcgggccagcagcctgcaagaaagagattgaatttcggtcagactggagacgcagactccgtacctgacccccagcctctcggacagccaccagcagcccccacaagtttgggatctactacaatggctacaggcagtggcgcaccaatggcagacaataacgagggtgccgatggagtgggtaattcctcaggaaattggcattgcgattcccaatggctgggcgacagagtcatcaccaccagcacccgaacctgggccctgcccacctacaacaaccacctctacaagcaaatctccagccaatcaggagcatcgaacgacaaccactactttggctacagcaccccttgggggtattttgacttcaacagattccactgtcacttctccccacgtgactggcaaagactcatcaacaacaactggggattccgacccaagagactcaacttcaagctctttaacattcaagtcaaagaggtcacgcagaatgacggtacgacgacgattgccaataaccttaccagcacggttcaggtgtttactgactcggagtaccagctcccgtacgtcctcggctcggcgcatcaaggatgcctcccgccgtttccagcggacgtcttcatggtcccacagtatggatacctcaccctgaacaacgggagtcaggcggtaggacgctcttccttttactgcctggagtactttccttctcagatgctgcgtaccggaaacaactttaccttcagctacacctttgaggacgtgcctttccacagcagctacgctcacagccagagtttggaccggctgatgaatcctctgatcgaccagtatctgtattatctgaacaggacacaatcaaatagtggaactcttcagcagtctaggctactgtttagccaagctggacccaccagcatgtctcttcaagctaaaaactggctgcctggaccttgctacagacagcagcgtctgtcaaagcaggcaaacgacaacaacaacagcaactttccctggactgcggctacaaagtatcatctaaatggtcgggactcgttggttaatccaggaccagctatggccagccacaaagacgatgaagaaaagtttttccccatgcatggaaccctgatatttggtaaacaaggaacaaatgctaacgacgcggatttggaacatgtcatgattacagatgaagaagaaatcaggaccaccaatcccgtggctacagagcagtacggaaacgtgtcaaataatttgcaaaactcaaatactggtccaactacagaaaatgtcaatcaccagggagcgttacctggtatggtgtggcaggatcgagacgtgtacctgcagggacccatttgggccaagattcctcacaccgacggacactttcacccttctccactgatgggaggttttggactcaaacacccgcctcctcaaatcatgatcaaaaacactcctgttccagccaatcctcctacaaacttcagcgcggcaaagtttgcttccttcatcacacagtattccacgggacaggtcagcgtggagatcgagtgggagctgcagaaggagaacagcaaacgctggaaccccgagatccagtacacttccaactacaacaaatctgttaatgtggactttactgtggacactaatggtgtgtattcagagcctcgccccattggcaccagatacctgactcgtaatctgtaa

SEQ ID NO: 4398 - DNA, 2208 bp, Artificial Sequence
  Description of Artificial Sequence: Synthetic polynucleotide
atggctgccgatggttatcttccagattggctcgaggacactctctctgaaggaataagacagtggtggaagctcaaacctggcccaccaccaccaaagcccgcagagcggcatcaggacgacagcaggggtcttgtgcttcctgggtacaagtacctcggacccttcaacggactcgacaaaggagagccggtcaacgaggcagacgctgcggccctcgagcacgacaaggcctacgaccggcagctcgacagcggagacaacccgtacctcaagtacaaccacgccgacgcggagtttcaggagcgtcttaaagaagatacgtcttttgggggcaacctcggacgagcagtcttccaggcgaaaaagagggttcttgaacctctgggcctggttgaggaacctgttaagacggctccgggaaaaaagaggccggtagagcactctcctgcggagccagactcctcctcgggaaccggaaaagcgggccagcagcctgcaagaaagagattgaatttcggtcagactggagacgcagactccgtacctgacccccagcctctcggacagccaccagcagcccccacaagtttgggatctactacaatggctacaggcagtggcgcaccaatggcagacaataacgagggtgccgatggagtgggtaattcctcaggaaattggcattgcgattcccaatggctgggcgacagagtcatcaccaccagcacccgaacctgggccctgcccacctacaacaaccacctctacaagcaaatctccagccaatcaggagcatcgaacgacaaccactactttggctacagcaccccttgggggtattttgacttcaacagattccactgtcacttctccccacgtgactggcaaagactcatcaacaacaactggggattccgacccaagagactcaacttcaagctctttaacattcaagtcaaagaggtcacgcagaatgacggtacgacgacgattgccaataaccttaccagcacggttcaggtgtttactgactcggagtaccagctcccgtacgtcctcggctcggcgcatcaaggatgcctcccgccgtttccagcggacgtcttcatggtcccacagtatggatacctcaccctgaacaacgggagtcaggcggtaggacgctcttccttttactgcctggagtactttccttctcagatgctgcgtaccggaaacaactttaccttcagctacacctttgaggacgtgcctttccacagcagctacgctcacagccagagtttggaccggctgatgaatcctctgatcgaccagtatctgtattatctgaacaggacacaatcaaatagtggaactcttcagcagtctaggctactgtttagccaagctggacccaccagcatgtctcttcaagctaaaaactggctgcctggaccttgctacagacagcagcgtctgtcaaagcaggcaaacgacaacaacaacagcaactttccctggactgcggctacaaagtatcatctaaatggtcgggactcgttggttaatccaggaccagctatggccagccacaaagacgatgaagaaaagtttttccccatgcatggaaccctgatatttggtaaacaaggaacaaatgctaacgacgcggatttggaacatgtcatgattacagatgaagaagaaatcaggaccaccaatcccgtggctacagagcagtacggaaacgtgtcaaataatttgcaaaactcaaatactggtccaactacagaaaatgtcaatcaccagggagcgttacctggtatggtgtggcaggatcgagacgtgtacctgcagggacccatttgggccaagattcctcacaccgacggacactttcacccttctccactgatgggaggttttggactcaaacacccgcctcctcaaatcatgatcaaaaacactcctgttccagccaatcctcctacaaacttcagcgcggcaaagtttgcttccttcatcacacagtattccacgggacaggtcagcgtggagatcgagcgggagctgcagaaggagaacagcaaacgctggaaccccgagatccagtacacttccaactacaacaaatctgttaatgtggactttactgtggacactaatggtgtgtattcagagcctcgccccattggcaccagatacctgactcgtaatctgtaa

SEQ ID NO: 4399 - DNA, 2208 bp, Artificial Sequence
  Description of Artificial Sequence: Synthetic polynucleotide
atggctgccgatggttatcttccagattggctcgaggacactctctctgaaggaataagacagtggtggaagctcaaacctggcccaccaccaccaaagcccgcagagcggcatcaggacgacagcaggggtcttgtgcttcctgggtacaagtacctcggacccttcaacggactcgacaaaggagagccggtcaacgaggcagacgctgcggccctcgagcacgacaaggcctacgaccggcagctcgacagcggagacaacccgtacctcaagtacaaccacgccgacgcggagtttcaggagcgtcttaaagaagatacgtcttttgggggcaacctcggacgagcagtcttccaggcgaaaaagagggttcttgaacctctgggcctggttgaggaacctgttaagacggctccgggaaaaaagaggccggtagagcactctcctgcggagccagactcctcctcgggaaccggaaaagcgggccagcagcctgcaagaaagagattgaatttcggtcagactggagacgcagactccgtacctgacccccagcctctcggacagccaccagcagcccccacaagtttgggatctactacaatggctacaggcagtggcgcaccaatggcagacaataacgagggtgccgatggagtgggtaattcctcaggaaattggcattgcgattcccaatggctgggcgacagagtcatcaccaccagcacccgaacctgggccctgcccacctacaacaaccacctctacaagcaaatctccagccaatcaggagcatcgaacgacaaccactactttggctacagcaccccttgggggtattttgacttcaacagattccactgtcacttctccccacgtgactggcaaagactcatcaacaacaactggggattccgacccaagagactcaacttcaagctctttaacattcaagtcaaagaggtcacgcagaatgacggtacgacgacgattgccaataaccttaccagcacggttcaggtgtttactgactcggagtaccagctcccgtacgtcctcggctcggcgcatcaaggatgcctcccgccgtttccagcggacgtcttcatggtcccacagtatggatacctcaccctgaacaacgggagtcaggcggtaggacgctcttccttttactgcctggagtactttccttctcagatgctgcgtaccggaaacaactttaccttcagctacacctttgaggacgtgcctttccacagcagctacgctcacagccagagtttggaccggctgatgaatcctctgatcgaccagtatctgtattatctgaacaggacacaatcaaatagtggaactcttcagcagtctaggctactgtttagccaagctggacccaccagcatgtctcttcaagctaaaaactggctgcctggaccttgctacagacagcagcgtctgtcaaagcaggcaaacgacaacaacaacagcaactttccctggactgcggctacaaagtatcatctaaatggtcgggactcgttggttaatccaggaccagctatggccagccacaaagacgatgaagaaaagtttttccccatgcatggaaccctgatatttggtaaacaaggaacaaatgctaacgacgcggatttggaacatgtcatgattacagatgaagaagaaatcaggaccaccaatcccgtggctacagagcagtacggaaacgtgtcaaataatttgcaaaactcaaatactggtccaactacagaaaatgtcaatcaccagggagcgttacctggtatggtgtggcaggatcgagacgtgtacctgcagggacccatttgggccaagattcctcacaccgacggacactttcacccttctccactgatgggaggttttggactcaaacacccgcctcctcaaatcatgatcaaaaacactcctgttccagccaatcctcctacaaacttcagcgcggcaaagtttgcttccttcatcacacagtattccacgggacaggtcagcgtggagatcgagtgggagctgcagaaggagaacagcaaacgctggaaccccgagatccagtacacttccaactacaacaaatctgttaatgtggaccttactgtggacactaatggtgtgtattcagagcctcgccccattggcaccagatacctgactcgtaatctgtaa

SEQ ID NO: 4400 - DNA, 2208 bp, Artificial Sequence
  Description of Artificial Sequence: Synthetic polynucleotide
atggctgccgatggttatcttccagattggctcgaggacactctctctgaaggaataagacagtggtggaagctcaaacctggcccaccaccgccaaagcccgcagagcggcacaaggacgacagtaggggtcttgtgcttcctgggtacaagtacctcggacccttcaacggactcgacaaaggagagccggtcaacgaggcagacgccgcggccctcgagcacgacaaggcctacgaccggcagctcgacagcggagacaacccgtacctcaagtacaaccacgccgacgcggagtttcaggagcgtcttaaagaagatacgtcttttgggggcaacctcggacgagcagtattccaggcgaaaaagagggttcttgaacctctgggcctggttgaggagcctgttaagacggctccgggaaaaaagaggccggtagagcactctcctgtggagccagactcctcctcgggaaccggaaaagcgggccagcagcctgcaagaaaaagattgaattttggtcagactggagacgcagactccgtacctgacccccagcctctcggacagccaccagcagcccccacaagtttgggatctactacaatggctacaggcagtggcgcaccaatggcagacaataacgagggtgccgatggagtgggtaattcctcaggaaattggcattgcgattcccaatggctgggcgacagagtcatcaccaccagcacccgaacctgggccctgcccacctacaacaaccacctctacaagcaaatctccagccaatcaggagcatcgaacgacaaccactactttggccacagcaccccttgggggtattttgacttcaacagattccactgtcacttctccccacgtgactggcaaagactcatcaacaacaactggggattccgacccaagagactcaacttcaagctctttaacattcaagtcaaagaggtcacgcagaatgacggtacgacgacgattgccaataaccttaccagcacggttcaggtgtttactgactcggagtaccagctcccgtacgtcctcggctcggcgcatcaaggatgcctcccgccgttcccagcagacgtcttcatggtcccacagtatggatacctcaccctgaacaacgggagtcaggcggtaggacgctcttccttttactgcctggagtactttccttctcagatgcttcgtaccggaaacaactttaccttcagctacacctttgaagacgtgcctttccacagtagctacgctcacagccagagtctggatcggctgatgaatcctcttatcgaccagtacctgtattatctaaacaaaacacaatcaaatagtggaactcttcagcagtctcggctactgtttagtcaagctggacccaccagcatgtctcttcaagctaaaaactggctgcctggaccttgctacagacaacagcgtctgtcaaagcaggcaaacgacaacaacaacagcaactttccctggactgcggctacaaagtatcatctaaatggccgggactcgttggttaatccaggaccagctatggccagccacaaagacgatgaagaaaagtttttccccatgcatggaaccctgatatttggtaaacaaggaacaaatgctaacgacgcggatttggacaatgtcatgattacagatgaagaagaaatccgcaccaccaatcccgtggctacggagcagtacgggactgtgtcaaataatttgcaaaactcaaatactggtccaactactggaactgtcaatcaccaaggagcgttacctggtatggtgtggcaggatcgagacgtgtacctgcagggacccatttgggccaagattcctcacaccgatggacactttcatccttctccactgatgggaggttttggactcaaacacccgcctcctcagatcatgatcaaaaacactcccgttccagccaatcctcctacaaacttcagttctgccaagtttgcttccttcatcacacagtattccacgggacaagtcagcgtggagattgagtgggagctgcagaaggagaacagcaaacgctggaaccccgagatccagtacacttccaactacaacaaatctgttaatgtggactttactgtggacactaatggcgtgtattcagagcctcgccccattggcaccagatacctgactcgtaatctgtaa

SEQ ID NO: 4401 - DNA, 2208 bp, Artificial Sequence
  Description of Artificial Sequence: Synthetic polynucleotide
atggctgccgatggttatcttccagattggctcgaggacactctctctgaaggaataagacagtggtggaagctcaaacctggcccaccaccgccaaagcccgcagagcggcacaaggacgacagtaggggtcttgtgcttcctgggtacaagtacctcggacccttcaacggactcgacaaaggagagccggtcaacgaggcagacgccgcggccctcgagcacgacaaggcctacgaccggcagctcgacagcggagacaacccgtacctcaagtacaaccacgccgacgcggagtttcaggagcgtcttaaagaagatacgtcttttgggggcaacctcggacgagcagtattccaggcgaaaaagagggttcttgaacctctgggcctggttgaggagcctgttaagacggctccgggaaaaaagaggccggtagagcactctcctgtggagccagactcctcctcgggaaccggaaaagcgggccagcagcctgcaagaaaaagattgaattttggtcagactggagacgcagactccgtacctgacccccagcctctcggacagccaccagcagcccccacaagtttgggatctactacaatggctacaggcagtggcgcaccaatggcagacaataacgagggtgccgatggagtgggtaattcctcaggaaattggcattgcgattcccaatggctgggcgacagagtcatcaccaccagcacccgaacctgggccctgcccacctacaacaaccacctctacaagcaaatctccagccaatcaggagcaccgaacgacaaccactactttggccacagcaccccttgggggtattttgacttcaacagattccactgtcacttctccccacgtgactggcaaagactcatcaacaacaactggggattccgacccaagagactcaacttcaagctctttaacattcaagtcaaagaggtcacgcagaatgacggtacgacgacgattgccaataaccttaccagcacggttcaggtgtttactgactcggagtaccagctcccgtacgtcctcggctcggcgcatcaaggatgcctcccgccgttcccagcagacgtcttcatggtcccacagtatggatacctcaccctgaacaacgggagccaggcggtaggacgctcttccttttactgcctggagtactttccttctcagatgcttcgtaccggaaacaactttaccttcagctacacctttgaagacgtgcctttccacagtagctacgctcacagccagagtctggatcggctgatgaatcctcttatcgaccagtacctgtattatctaaacaaaacacaatcaaatagtggaactcttcagcagtctcggctactgtttagtcaagctggacccaccagcatgtctcttcaagctaaaaactggctgcctggaccttgctacagacaacagcgtctgtcaaagcaggcaaacgacaacaacaacagcaactttccctggactgcggctacaaagtatcatctaaatggccgggactcgttggttaatccaggaccagctatggccagccacaaagacgatgaagaaaagtttttccccatgcatggaaccctgatatttggtaaacaaggaacaaatgctaacgacgcggatttggacaatgtcatgattacagatgaagaagaaatccgcaccaccaatcccgtggctacggagcagtacgggactgtgtcaaataatttgcaaaactcaaatactggtccaactactggaactgtcaatcaccaaggagcgttacctggtatggtgtggcaggatcgagacgtgtacctgcagggacccatttgggccaagattcctcacaccgatggacactttcatccttctccactgatgggaggttttggactcaaacacccgcctcctcagatcatgatcaaaaacactcccgttccagccaatcctcctacaaacttcagttctgccaagtttgcttccttcatcacacagtattccacgggacaagtcagcgtggagattgagtgggagctgcagaaggagaacagcaaacgctggaaccccgagatccagtacacttccaactacaacaaatctgttaatgtggactttactgtggacactaatggcgtgtattcagagcctcgccccattggcaccagatacctgactcgtaatctgtaa

SEQ ID NO: 4402 - DNA, 2208 bp, Artificial Sequence
  Description of Artificial Sequence: Synthetic polynucleotide
atggctgccgatggttatcttccagattggctcgaggacactctctctgaaggaataagacagtggtggaagctcaaacctggcccaccaccgccaaagcccgcagagcggcacaaggacgacagtaggggtcttgtgcttcctgggtacaagtacctcggacccttcaacggactcgacaaaggagagccggtcaacgaggcagacgccgcggccctcgagcacgacaaggcctacgaccggcagctcgacagcggagacaacccgtacctcaagtacaaccacgccgacgcggagtttcaggagcgtcttaaagaagatacgtcttttgggggcaacctcggacgagcagtattccaggcgaaaaagagggttcttgaacctctgggcctggttgaggagcctgttaagacggctccgggaaaaaagaggccggtagagcactctcctgtggagccagactcctcctcgggaaccggaaaagcgggccagcagcctgcaagaaaaagattgaattttggtcagactggagacgcagactccgtacctgacccccagcctctcggacagccaccagcagcccccacaagtttgggatctactacaatggctacaggcagtggcgcaccaatggcagacaataacgagggtgccgatggagtgggtaattcctcaggaaattggcattgcgattcccaatggctgggcgacagagtcatcaccaccagcacccgaacctgggccctgcccacctacaacaaccacctctacaagcaaatctccagccaatcaggagcatcgaacgacaaccactactttggccacagcaccccttgggggtattttgacttcaacagattccactgtcacttctccccacgtgactggcaaagactcatcaacaacaactggggattccgacccaagagactcaacttcaagctctttaacattcaagtcaaagaggtcacgcagaatgacggtacgacgacgattgccaataaccttaccagcacggttcaggtgtttactgactcggagtaccagctcccgtacgtcctcggctcggcgcatcaaggatgcctcccgccgttcccagcagacgtcttcatggtcccacagtatggatacctcaccctgaacaacgggagtcaggcggtaggacgctcttccttttactgcctggagtactttccttctcagatgcttcgtaccggaaacaactttaccttcagctacacctttgaagacgtgcctttccacagtagctacgctcacagccagagtctggatcggctgatgaatcctcttatcgaccagtacctgtattatctaaacaaaacacaatcaaatagtggaactcttcagcagtctcggctactgtttagtcaagctggacccaccagcatgtctcttcaagctaaaaactggctgcctggaccttgctacagacaacagcgtctgtcaaagcaggcaaacgacaacaacaacagcaactttccctggactgcggctacaaagtatcatctaaatggccgggactcgttggttaatccaggaccagctatggccagccacaaagacgatgaagaaaagtttttccccatgcatggaaccctgatatttggtaaacaaggaacaaatgctaacgacgcggatttggacaatgtcatgattacagatgaagaagaaatccgcaccaccaatcccgtggctacggagcagtacgggactgtgtcaaataatttgcaaaactcaaatactggtccaactactggaactgtcaatcaccaaggagcgttacctggtatggtgtggcaggatcgagacgtgtacctgcagggacccatttgggccaagattcctcacaccgatggacactttcatccttctccactgatgggaggttttggactcaaacacccgcctcctcagatcatgatcaaaaacactcccgttccagccaatcctcctacaaacttcagttctgccaagtttgcttccttcatcacacagtattccacaggacaagtcggcgtggagattgagtgggagctgcagaaggagaacagcaaacgctggaaccccgagatccagtacacttccaactacaacaaatctgttaatgtggactttactgtggacactaatggcgtgtattcagagcctcgccccattggcaccagatacctgactcgtaatctgtaa

SEQ ID NO: 4403 - DNA, 2208 bp, Artificial Sequence
  Description of Artificial Sequence: Synthetic polynucleotide
atggctgccgatggttatcttccagattggctcgaggacactctctctgaaggaataagacagtggtggaagctcaaacctggcccaccaccgccaaagcccgcagagcggcacaaggacgacagtaggggtcttgtgcttcctgggtacaagtacctcggacccttcaacggactcgacaaaggagagccggtcaacgaggcagacgccgcggccctcgagcacgacaaggcctacgaccggcagctcgacagcggagacaacccgtacctcaagtacaaccacgccgacgcggagtttcaggagcgtcttaaagaagatacgtcttttgggggcaacctcggacgagcagtattccaggcgaaaaagagggttcttgaacctctgggcctggttgaggagcctgttaagacggctccgggaaaaaagaggccggtagagcactctcctgtggagccagactcctcctcgggaaccggaaaagcgggccagcagcctgcaagaaaaagattgaattttggtcagactggagacgcagactccgtacctgacccccagcctctcggacagccaccagcagcccccacaagtttgggatctactacaatggctacaggcagtggcgcaccaatggcagacaataacgagggtgccgatggagtgggtaattcctcaggaaattggcattgcgattcccaatggctgggcgacagagtcatcaccaccagcacccgaacctgggccctgcccacctacaacaaccacctctacaagcaaatctccagccaatcaggagcatcgaacgacaaccactactttggccacagcaccccttgggggtattttgacttcaacagattccactgtcacttctccccacgtgactggcaaagactcatcaacaacaactggggattccgacccaagagactcaacttcaagctctttaacattcaagtcaaagaggtcacgcagaatgacggtacgacgacgattgccaataaccttaccagcacggttcaggtgtttactgactcggagtaccagctcccgtacgtcctcggctcggcgcatcaaggatgcctcccgccgttcccagcagacgtcttcatggtcccacagtatggatacctcaccctgaacaacgggagtcaggcggtaggacgctcttccttttactgcctggagtactttccttctcagatgcttcgtaccggaaacaactttaccttcagctacacctttgaagacgtgcctttccacagtagctacgctcacagccagagtctggatcggctgatgaatcctcttatcgaccagtacctgtattatctaaacaaaacaaacaatcaaagtggaaccttcacgcagtctcggctactgtttagtcaagctggacccaccagcattctcttcaagtctaaaaactggctgcctggaccttgctacagacaacagcgtctgtcaaagcgggcaaacgacaacaacaacagcaactttccctggactgcggctacaaagtatcatctaaatggccgggactcgttggttaatccaggaccagctatggccagccacaaagacgatgaagaaaagttttttccccagcatggaaccctgatatttggtaaacaaggaacaaagctaacagacgcggatttggacaatgtcatgattacagatgaagaagaaatccgcaccaccaatcccgtggctacggagcagtacgggactgtgtcaaataatttgcagaaactcaacatactggcaactactggaactgtcaacacacaaggagcgttacctggtatggtgtggcaggatcgagacgtgtacctgcagggacccatttgggccaagattcctcacaccgatggacactttcatccttctccactgatgggaggttttggactcaaacacccgcctcctcagatcatgatcaaaaacactcccgttccagccaatcctcctacaaacttcagttctgccaagtttgcttccttcatcacacagtattccacgggacaagtcagcgtggagattgagtgggagctgcagaaggagaacagcaaacgctggaaccccgagatccagtacacttccaactacaacaaatctgttaatgtggactttactgtggacactaatggcgtgtattcagagcctcgccccattggcaccagatacctgactcgtaatctgtaa

SEQ ID NO: 4404 - DNA, 2208 bp, Artificial Sequence
  Description of Artificial Sequence: Synthetic polynucleotide
atggctgccgatggttatcttccagattggctcgaggacactctctctgaaggaataagacagtggtggaagctcaaacctggcccaccaccgccaaagcccgcagagcggcacaaggacgccagtaggggtcttgtgcttcctgggtacaagtacctcggacccttcaacggactcgacaaaggagagccggtcaacgaggcagacgccgcggccctcgagcacgacaaggcctacgaccggcagctcgacagcggagacaacccgtacctcaagtacaaccacgccgacgcggagtttcaggagcgtcttaaagaagatacgtcttttgggggcaacctcggacgagcagtattccaggcgaaaaagagggttcttgaacctctgggcctggttgaggagcctgttaagacggctccgggaaaaaagaggccggtagagcactctcctgtggagccagactcctcctcgggaaccggaaaagcgggccagcagcctgcaagaaaaagattgaattttggtcagactggagacgcagactccgtacctgacccccagcctctcggacagccaccagcagcccccacaagtttgggatctactacaatggctacaggcagtggcgcaccaatggcagacaataacgagggtgccgatggagtgggtaattcctcaggaaattggcattgcgattcccaatggctgggcgacagagtcatcaccaccagcacccgaacctgggccctgcccacctacaacaaccacctctacaagcaaatctccagccaatcaggagcatcgaacgacaaccactactttggctacagcaccccttgggggtattttgacttcaacagattccactgtcacttctccccacgtgactggcaaagactcatcaacaacaactggggattccgacccaagagactcaacttcaagctctttaacattcaagtcaaagaggtcacgcagaatgacggtacgacgacgattgccaataaccttaccagcacggttcaggtgtttactgactcggagtaccagctcccgtacgtcctcggctcggcgcatcaaggatgcctcccgccgttcccagcagacgtcttcatggtcccacagtatggatacctcaccctgaacaacgggagtcaggcggtaggacgctcttccttttactgcctggagtactttccttctcagatgcttcgtaccggaaacaactttaccttcagctacacctttgaagacgtgcctttccacagtagctacgctcacagccagagtctggatcggctgatgaatcctcttatcgaccagtacctgtattatctaaacaaaacaaacaatcaaagtggaaccttcacgcagtctcggctactgtttagtcaagctggacccaccagcattctcttcaagtctaaaaactggctgcctggaccttgctacagacaacagcgtctgtcaaagacagcaaacgacaacaacaacagcaactttccctggactgcggctacaaagtatcatctaaatggccgggactcgttggttaatccaggaccagctatggccagccacaaagacgatgaagaaaagttttttccccagcatggaaccctgatatttggtaaacaaggaacaaagctaacagacgcggatttggacaatgtcatgattacagatgaagaagaaatccgcaccaccaatcccgtggctacggagcagtacgggactgtgtcaaataatttgcagaaactcaacatactggcaactactggaactgtcaacacacaaggagcgttacctggtatggtgtggcaggatcgagacgtgtacctgcagggacccatttgggccaagattcctcacaccgatggacactttcatccttctccactgatgggaggttttggactcaaacacccgcctcctcagatcatgatcaaaaacactcccgttccagccaatcctcctacaaacttcagttctgccaagtttgcttccttcatcacacagtattccacgggacaagtcagcgtggagattgagtgggagctgcagaaggagaacagcaaacgctggaaccccgagatccagtacacttccaactacaacaaatctgttaatgtggactttactgtggacactaatggcgtgtattcagagcctcgccccattggcaccagatacctgactcgtaatctgtaa

SEQ ID NO: 4405 - DNA, 2208 bp, Artificial Sequence
  Description of Artificial Sequence: Synthetic polynucleotide
atggctgccgatggttatcttccagattggctcgaggacactctctctgaaggaataagacagtggtggaagctcaaacctggcccaccaccgccaaagcccgcagagcggcacaaggacgacagtaggggtcttgtgcttcctgggtacaagtacctcggacccttcaacggactcgacaaaggagagccggtcaacgaggcagacgccgcggccctcgagcacgacaaggcctacgaccggcagctcgacagcggagacaacccgtacctcaagtacaaccacgccgacgcggagtttcaggagcgtcttaaagaagatacgtcttttgggggcaacctcggacgagcagtattccaggcgaaaaagagggttcttgaacctctgggcctggttgaggagcctgttaagacggctccgggaaaaaagaggccggtagagcactctcctgtggagccagactcctcctcgggaaccggaaaagcgggccagcagcctgcaagaaaaagattgaattttggtcagactggagacgcagactccgtacctgacccccagcctctcggacagccaccagcagcccccacaagtttgggatctactacaatggctacaggcagtggcgcaccaatggcagacaataacgagggtgccgatggagtgggtaattcctcaggaaattggcattgcgattcccaatggctgggcgacagagtcatcaccaccagcacccgaacctgggccctgcccacctacaacaaccacctctacaagcaaatctccagccaatcaggagcatcgaacgacaaccactactttggccacagcaccccttgggggtattttgacttcaacagattccactgtcacttctccccacgtgactggcaaagactcatcaacaacaactggggattccgacccaagagactcaacttcaagctctttaacattcaagtcaaagaggtcacgcagaatgacggtacgacgacgattgccaataaccttaccagcacggttcaggtgtttactgactcggagtaccagctcccgtacgtcctcggctcggcgcatcaaggatgcctcccgccgttcccagcagacgtcttcatggtcccacagtatggatacctcaccctgaacaacgggagtcaggcggtaggacgctcttccttttactgcctggagtactttccttctcagatgcttcgtaccggaaacaactttaccttcagctacacctttgaagacgtgcctttccacagtagctacgctcacagccagagtctggatcggctgatgaatcctcttatcgaccagtacctgtattatctaaacaaaacaaacaatcaaagtggaaccttcacgcagtctcggctactgtttagtcaagctggacccaccagcattctcttcaagtctaaaaactggctgcctggaccttgctacagacaacagcgtctgtcaaagacagcaaacgacaacaacaacagcaactttccctggactgcggctacaaagtatcatctaaatggccgggactcgttggttaatccaggaccagctatggccagccacaaagacgatgaagaaaagttttttccccagcatggaaccctgatatttggtaaacaaggaacaaagctaacagacgcggatttggacaatgtcatgattacagatgaagaagaaatccgcaccaccaatcccgtggctacggagcagtacgggactgtgtcaaataatttgcagaaactcaacatactggcaactactggaactgtcaacacacaaggagcgttacctggtatggtgtggcaggatcgagacgtgtacctgcagggacccatttgggccaagattcctcacaccgatggacactttcatccttctccactgatgggaggttttggactcaaacacccgcctcctcagatcatgatcaaaaacactcccgttccagccaatcctcctacaaacttcagttctgccaagtttgcttccttcatcacacagtattccacgggacaagtcagcgtggagattgagtgggagctgcagaaggagaacagcaaacgctggaaccccgagatccagtacacttccaactacaacaaatctgttaatgtggactttactgtggacactaatggcgtgtattcagagcctcgccccattggcaccagatacctgactcgtaatctgtaa

SEQ ID NO: 4406 - DNA, 2208 bp, Artificial Sequence
  Description of Artificial Sequence: Synthetic polynucleotide
atggctgccgatggttatcttccagattggctcgaggacactctctctgaaggaataagacagtggtggaagctcaaacctggcccaccaccaccaaagcccgcagagcggcatcaggacgacagcaggggtcttgtgcttcctgggtacaagtacctcggacccttcaacggactcgacaaaggagagccggtcaacgaggcagacgctgcggccctcgagcacgacaaggcctacgaccggcagctcgacagcggagacaacccgtacctcaagtacaaccacgccgacgcggagtttcaggagcgtcttaaagaagatacgtcttttgggggcaacctcggacgagcagtcttccaggcgaaaaagagggttcttgaacctctgggcctggttgaggaacctgttaagacggctccgggaaaaaagaggccggtagagcactctcctgcggagccagactcctcctcgggaaccggaaaagcgggccagcagcctgcaagaaagagattgaatttcggtcagactggagacgcagactccgtacctgacccccagcctctcggacagccaccagcagcccccacaagtttgggatctactacaatggctacaggcagtggcgcaccaatggcagacaataacgagggtgccgatggagtgggtaattcctcaggaaattggcattgcgattcccaatggctgggcgacggagtcatcaccaccagcacccgaacctgggccctgcccacctacaacaaccacctctacaagcaaatctccagccaatcaggagcatcgaacgacaaccactactttggctacagcaccccttgggggtattttgacttcaacagattccactgtcacttctccccacgtgactggcaaagactcatcaacaacaactggggattccgacccaagagactcaacttcaagctctttaacattcaagtcaaagaggtcacgcagaatgacggtacgacgacgattgccaataaccttaccagcacggttcaggtgtttactgactcggagtaccagctcccgtacgtcctcggctcggcgcatcaaggatgcctcccgccgtttccagcggacgtcttcatggtcccacagtatggatacctcaccctgaacaacgggagtcaggcggtaggacgctcttccttttactgcctggagtactttccttctcagatgctgcgtaccggaaacaactttaccttcagctacacctttgaggacgtgcctttccacagcagctacgctcacagccagagtttggaccggctgatgaatcctctgatcgaccagtatctgtattatctgaacaggacacaatcaaatagtggaactcttcagcagtctaggctactgtttagccaagctggacccaccagcatgtctcttcaagctaaaaactggctgcctggaccttgctacagacagcagcgtctgtcaaagcaggcaaacgacaacaacaacagcaactttccctggactgcggctacaaagtatcatctaaatggtcgggactcgttggttaatccaggaccagctatggccagccacaaagacgatgaagaaaagtttttccccatgcatggaaccctgatatttggtaaacaaggaacaaatgctaacgacgcggatttggaacatgtcatgattacagatgaagaagaaatcaggaccaccaatcccgtggctacagagcagtacggaaacgtgtcaaataatttgcaaaactcaaatactggtccaactacagaaaatgtcaatcaccagggagcgttacctggtatggtgtggcaggatcgagacgtgtacctgcagggacccatttgggccaagattcctcacaccgacggacactttcacccttctccactgatgggaggttttggactcaaacacccgcctcctcaaatcatgatcaaaaacactcctgttccagccaatcctcctacaaacttcagcgcggcaaagtttgcttccttcatcacacagtattccacgggacaggtcagcgtggagatcgagtgggagctgcagaaggagaacagcaaacgctggaaccccgagatccagtacacttccaactacaacaaatctgttaatgtggactttactgtggacactaatggtgtgtattcagagcctcgccccattggcaccagatacctgactcgtaatctgtaa

SEQ ID NO: 4407 - DNA, 2208 bp, Artificial Sequence
  Description of Artificial Sequence: Synthetic polynucleotide
atggctgccgatggttatcttccagattggctcgaggacactctctctgaaggaataagacagtggtggaagctcaaacctggcccaccaccaccaaagcccgcagagcggcatcaggacgacagcaggggtcttgtgcttcctgggtacaagtacctcggacccttcaacggactcgacaaaggagagccggtcaacgaggcagacgctgcggccctcgagcacgacaaggcctacgaccggcagctcgacagcggagacaacccgtacctcaagtacaaccacgccgacgcggagtttcaggagcgtcttaaagaagatacgtcttttgggggcaacctcggacgagcagtcttccaggcgaaaaagagggttcttgaacctctgggcctggttgaggaacctgttaagacggctccgggaaaaaagaggccggtagagcactctcctgcggagccagactcctcctcgggaaccggaaaagcgggccagcagcctgcaagaaagagattgaatttcggtcagactggagacgcagactccgtacctgacccccagcctctcggacagccaccagcagcccccacaagtttgggatctactacaatggctacaggcagtggcgcaccaatggcagacaataacgagggtgccgatggagtgggtaattcctcaggaaattggcattgcgattcccaatggctgggcgacagagtcatcaccaccagcacccgaacctgggccctgcccacctacaacaaccacctctacaagcaaatctccagccaatcaggagcatcgaacgacaaccactactttggctacagcaccccttgggggtattttgacttcaacagattccactgtcacttctccccacgtgactggcaaagactcatcaacaacaactggggattccgacccaagagactcaacttcaagctctttaacattcaagtcaaagaggtcacgcagaatgacggtacgacgacgattgccaataaccttaccagcacggttcaggcgtttactgactcggagtaccagctcccgtacgtcctcggctcggcgcatcaaggatgcctcccgccgtttccagcggacgtcttcatggtcccacagtatggatacctcaccctgaacaacgggagtcaggcggtaggacgctcttccttttactgcctggagtactttccttctcagatgctgcgtaccggaaacaactttaccttcagctacacctttgaggacgtgcctttccacagcagctacgctcacagccagagtttggaccggctgatgaatcctctgatcgaccagtatctgtattatctgaacaggacacaatcaaatagtggaactcttcagcagtctaggctactgtttagccaagctggacccaccagcatgtctcttcaagctaaaaactggctgcctggaccttgctacagacagcagcgtctgtcaaagcaggcaaacgacaacaacaacagcaactttccctggactgcggctacaaagtatcatctaaatggtcgggactcgttggttaatccaggaccagctatggccagccacaaagacgatgaagaaaagtttttccccatgcatggaaccctgatatttggtaaacaaggaacaaatgctaacgacgcggatttggaacatgtcatgattacagatgaagaagaaatcaggaccaccaatcccgtggctacagagcagtacggaaacgtgtcaaataatttgcaaaactcaaatactggtccaactacagaaaatgtcaatcaccagggagcgttacctggtatggtgtggcaggatcgagacgtgtacctgcagggacccatttgggccaagattcctcacaccgacggacactttcacccttctccactgatgggaggttttggactcaaacacccgcctcctcaaatcatgatcaaaaacactcctgttccagccaatcctcctacaaacttcagcgcggcaaagtttgcttccttcatcacacagtattccacgggacaggtcagcgtggagatcgagtgggagctgcagaaggagaacagcaaacgctggaaccccgagatccagtacacttccaactacaacaaatctgttaatgtggactttactgtggacactaatggtgtgtattcagagcctcgccccattggcaccagatacctgactcgtaatctgtaa

SEQ ID NO: 4408 - DNA, 2208 bp, Artificial Sequence
  Description of Artificial Sequence: Synthetic polynucleotide
atggctgccgatggttatcttccagattggctcgaggacactctctctgaaggaataagacagtggtggaagctcaaacctggcccaccaccaccaaagcccgcagagcggcatcaggacgacagcaggggtcttgtgcttcctgggtacaagtacctcggacccttcaacggactcgacaaaggagagccggtcaacgaggcagacgctgcggccctcgagcacgacaaggcctacgaccggcagctcgacagcggagacaacccgtacctcaagtacaaccacgccgacgcggagtttcaggagcgtcttaaagaagatacgtcttttgggggcaacctcggacgagcagtcttccaggcgaaaaagagggttcttgaacctctgggcctggttgaggaacctgttaagacggctccgggaaaaaagaggccggtagagcactctcctgcggagccagactcctcctcgggaaccggaaaagcgggccagcagcctgcaagaaagagattgaatttcggtcagactggagacgcagactccgtacctgacccccagcctctcggacagccaccagcagcccccacaagtttgggatctactacaatggctacaggcagtggcgcaccaatggcagacaataacgagggtgccgatggagtgggtaattcctcaggaaattggcattgcgattcccaatggctgggcgacagagtcatcaccaccagcacccgaacctgggccctgcccacctacaacaaccacctctacaagcaaatctccagccaatcaggagcatcgaacgacaaccactactttggctacagcaccccttgggggtattttgacttcaacagattccactgtcacttctccccacgtgactggcaaagactcatcaacaacaactggggattccgacccaagagactcaacttcaagctctttaacattcaagtcaaagaggtcacgcagaatgacggtacgacgacgattgccaataaccttaccagcacggttcaggtgtttactgactcggagtaccagctcccgtacgtcctcggctcggcgcatcaaggatgcctcccgccgtttccagcggacgtcttcatggtcccacagtatggatacctcaccctgaacaacgggagtcaggcggtaggacgctcttccttttactgcctggagtactttccttctcagatgctgcgtaccggaaacaactttaccttcagctacacctttgaggacgtgcctttccacagcagctacgctcacagccagagtttggaccggctgatgaatcctctgatcgaccagtatctgtattatctgaacaggacacaatcaaatagtggaactcttcagcagtctaggctactgtttagccaagctggacccaccagcatgtctcttcaagctaaaaactggctgcctggaccttgctacagacagcagcgtctgtcaaagcaggcaaacgacaacaacaacagcaactttccctggactgcggctacaaagtatcatctaaatggtcgggactcgttggttaatccaggaccagctatggccagccacaaagacgatgaagaaaagtttttccccatgcatggaaccctgatatttggtaaacaaggaacaaatgctaacgacgcggatttggaacatgtcatgattacagatgaagaagaaatcaggaccaccaatcccgtggctacagagcagtacggaaacgtgtcaaataatttgcaaaactcaaatactggtccaactacagaaaatgtcaatcaccagggagcgttacctggtatggtgtggcaggatcgagacgtgtacctgcagggacccatttgggccaagattcctcacaccgacggacactttcacccttctccactgatgggaggttttggactcaaacacccgcctcctcaaatcatgatcaaaaacactcctgttccagccaatcctcctacaaacttcagcgcggcaaagtttgcttccttcatcacacagtattccacgggacaggtcagcgtggagatcgagtgggagctgcagaaggggaacagcaaacgctggaaccccgagatccagtacacttccaactacaacaaatctgttaatgtggactttactgtggacactaatggtgtgtattcagagcctcgccccattggcaccagatacctgactcgtaatctgtaa

SEQ ID NO: 4409 - DNA, 2208 bp, Artificial Sequence
  Description of Artificial Sequence: Synthetic polynucleotide
atggctgccgatggttatcttccagattggctcgaggacactctctctgaaggaataagacagtggtggaagctcaaacctggcccaccaccaccaaagcccgcagagcggcatcaggacgacagcaggggtcttgtgcttcctgggtacaagtacctcggacccttcaacggactcgacaaaggagagccggtcaacgaggcagacgctgcggccctcgagcacgacaaggcctacgaccggcagctcgacagcggagacaacccgtacctcaagtacaaccacgccgacgcggagtttcaggagcgtcttaaagaagatacgtcttttgggggcaacctcggacgagcagtcttccaggcgaaaaagagggttcttgaacctctgggcctggttgaggaacctgttaagacggctccgggaaaaaagaggccggtagagcactctcctgcggagccagactcctcctcgggaaccggaaaagcgggccagcagcctgcaagaaagagattgaatttcggtcagactggagacgcagactccgtacctgacccccagcctctcggacagccaccagcagcccccacaagtttgggatctactacaatggctacaggcagtggcgcaccaatggcagacaataacgagggtgccgatggagtgggtaattcctcaggaaattggcattgcgattcccaatggctgggcgacagagtcatcaccaccagcacccgaacctgggccctgcccacctacaacaaccacctctacaagcaaatctccagccaatcaggagcatcgaacgacaaccactactttggctacagcaccccttgggggtattttgacttcaacagattccactgtcacttctccccacgtgactggcaaagactcatcaacaacaactggggattccgacccaagagactcaacttcaagctctttaacattcaagtcaaagaggtcacgcagaatgacggtacgacgacgattgccaataaccttaccagcacggttcaggtgtttactgactcggagtaccagctcccgtacgtcctcggctcggcgcatcaaggatgcctcccgccgtttccagcggacgtcttcatggtcccacagtatggatacctcaccctgaacaacgggagtcaggcggtaggacgctcttccttttactgcctggagtactttccttctcagatgctgcgtaccggaaacaactttaccttcagctacacctttgaggacgtgcctttccacagcagctacgctcacagccagagtttggaccggctgatgaatcctctgatcgaccagtatctgtattatctgaacaggacacaatcaaatagtggaactcttcagcagtctaggctactgtttagccaagctggacccaccagcatgtctcttcaagctaaaaactggctgcctggaccttgctacagacagcagcgtctgtcaaagcaggcaaacgacaacaacaacagcaactttccctggactgcggctacaaagtatcatctaaatggtcgggactcgttggttaatccaggaccagctatggccagccacaaagacgatgaagaaaagtttttccccatgcatggaaccctgatatttggtaaacaaggaacaaatgctaacgacgcggatttggaacatgtcatgattacagatgaagaagaaatcaggaccaccaatcccgtggctacagagcagtacggaaacgtgtcaaataatttgcaaaactcaaatactggtccaactacagaaaatgtcaatcaccagggagcgttacctggtatggtgtggcaggatcgagacgtgtacctgcagggacccatttgggccaagattcctcacaccgacggacactttcacccttctccactgatgggaggttttggactcaaacacccgcctcctcaaatcatgatcaaaaacactcctgttccagccaatcctcctacaaacttcagcgcggcaaagtttgcttccttcatcacacagtattccacgggacaggtcagcgtggagatcgagtgggggctgcagaaggagaacagcaaacgctggaaccccgagatccagtacacttccaactacaacaaatctgttaatgtggactttactgtggacactaatggtgtgtattcagagcctcgccccattggcaccagatacctgactcgtaatctgtaa

SEQ ID NO: 4410 - DNA, 2208 bp, Artificial Sequence
  Description of Artificial Sequence: Synthetic polynucleotide
atggctgccgatggttatcttccagattggctcgaggacactctctctgaaggaataagacagtggtggaagctcaaacctggcccaccaccaccaaagcccgcagagcggcatcaggacgacagcaggggtcttgtgcttcctgggtacaagtacctcggacccttcaacggactcgacaaaggagagccggtcaacgaggcagacgctgcggccctcgagcacgacaaggcctacgaccggcagctcgacagcggagacaacccgtacctcaagtacaaccacgccgacgcggagtttcaggagcgtcttaaagaagatacgtcttttgggggcaacctcggacgagcagtcttccaggcgaaaaagagggttcttgaacctctgggcctggttgaggaacctgttaagacggctccgggaaaaaagaggccggtagagcactctcctgcggagccagactcctcctcgggaaccggaaaagcgggccagcagcctgcaagaaagagattgaatttcggtcagactggagacgcagactccgtacctgacccccagcctctcggacagccaccagcagcccccacaagtttgggatctactacaatggctacaggcagtggcgcaccaatggcagacaataacgagggtgccgatggagtgggtaattcctcaggaaattggcattgcgattcccaatggctgggcgacagagtcatcaccaccagcacccgaacctgggccctgcccacctacaacaaccacctctacaagcaaatctccagccaatcaggagcatcgaacgacaaccactactttggctacagcaccccttgggggtattttgacttcaacagattccactgtcacttctccccacgtgactggcaaagactcatcaacaacaactggggattccgacccaagagactcaacttcaagctctttaacattcaagtcaaagaggtcacgcagaatgacggtacgacgacgattgccaataaccttaccagcacggttcaggtgtttactgactcggagtaccagctcccgtacgtcctcggctcggcgcatcaaggatgcctcccgccgtttccagcggacgtcttcatggtcccacagtatggatacctcaccctgaacaacgggagtcaggcggtaggacgctcttccttttactgcctggagtactttccttctcagatgctgcgtaccggaaacaactttaccttcagctacacctttgaggacgtgcctttccacagcagctacgctcacagccagagtttggaccggctgatgaatcctctgatcgaccagtatctgtattatctgaacaggacacgatcaaatagtggaactcttcagcagtctaggctactgtttagccaagctggacccaccagcatgtctcttcaagctaaaaactggctgcctggaccttgctacagacagcagcgtctgtcaaagcaggcaaacgacaacaacaacagcaactttccctggactgcggctacaaagtatcatctaaatggtcgggactcgttggttaatccaggaccagctatggccagccacaaagacgatgaagaaaagtttttccccatgcatggaaccctgatatttggtaaacaaggaacaaatgctaacgacgcggatttggaacatgtcatgattacagatgaagaagaaatcaggaccaccaatcccgtggctacagagcagtacggaaacgtgtcaaataatttgcaaaactcaaatactggtccaactacagaaaatgtcaatcaccagggagcgttacctggtatggtgtggcaggatcgagacgtgtacctgcagggacccatttgggccaagattcctcacaccgacggacactttcacccttctccactgatgggaggttttggactcaaacacccgcctcctcaaatcatgatcaaaaacactcctgttccagccaatcctcctacaaacttcagcgcggcaaagtttgcttccttcatcacacagtattccacgggacaggtcagcgtggagatcgagtgggagctgcagaaggagaacagcaaacgctggaaccccgagatccagtacacttccaactacaacaaatctgttaatgtggactttactgtggacactaatggtgtgtattcagagcctcgccccattggcaccagatacctgactcgtaatctgtaa

SEQ ID NO: 4411 - DNA, 2208 bp, Artificial Sequence
  Description of Artificial Sequence: Synthetic polynucleotide
atggctgccgatggttatcttccagattggctcgaggacactctctctgaaggaataagacagtggtggaagctcaaacctggcccaccaccaccaaagcccgcagagcggcatcaggacgacagcaggggtcttgtgcttcctgggtacaagtacctcggacccttcaacggactcgacaaaggagagccggtcaacgaggcagacgctgcggccctcgagcacgacaaggcctacgaccggcagctcgacagcggagacaacccgtacctcaagtacaaccacgccgacgcggagtttcaggagcgtcttaaagaagatacgtcttttgggggcaacctcggacgagcagtcttccaggcgaaaaagagggttcttgaacctctgggcctggttgaggaacctgttaagacggctccgggaaaaaagaggccggtagagcactctcctgcggagccagactcctcctcgggaaccggaaaagcgggccagcagcctgcaagaaagagattgaatttcggtcagactggagacgcagactccgtacctgacccccagcctctcggacagccaccagcagcccccacaagtttgggatctactacaatggctacaggcagtggcgcaccaatggcagacaataacgagggtgccgatggagtgggtaattcctcaggaaattggcattgcgattcccaatggctgggcgacagagtcatcaccaccagcacccgaacctgggccctgcccacctacaacaaccacctctacaagcaaatctccagccaatcaggagcatcgaacgacaaccactactttggctacagcaccccttgggggtattttgacttcaacagattccactgtcacttctccccacgtgactggcaaagactcatcaacaacaactggggattccgacccaagagactcaacttcaagctctttaacattcaagtcaaagaggtcacgcagaatgacggtacgacgacgattgccaataaccttaccagcacggttcaggtgtttactgactcggagtaccagctcccgtacgtcctcggctcggcgcatcaaggatgcctcccgccgtttccagcggacgtcttcatggtcccacagtatggatacctcaccctgaacaacgggagtcaggcggtaggacgctcttccttttactgcctggagtactttccttctcagatgctgcgtaccggaaacaactttaccttcagctacacctttgaggacgtgcctttccacagcagctacgctcacagccagagtttggaccggctgatgaatcctctgatcgaccagtatctgtattatctgaacaggacacaatcaaatagtggaactcttcagcagtctaggctactgtttagccaagctggacccaccagcatgtctcttcaagctaaaaactggctgcctggaccttgctacagacagcagcgtctgtcaaagcaggcaaacgacaacaacaacagcaactttccctggactgcggctacaaagtatcatctaaatggtcgggactcgttggttaatccaggaccagctatggccagccacaaagacgatgaagaaaagtttttccccatgcatggaaccctgatatttggtaaacaaggaacaaatgctaacgacgcggatttggaacatgtcatgattacagatgaagaagaaatcaggaccaccaatcccgtggctacagagcagtacggaaacgtgtcaaataatttgcaaaactcaaatactggtccaactacagaaaatgtcaatcaccagggagcgttacctggtatggtgtggcaggatcgaggcgtgtacctgcagggacccatttgggccaagattcctcacaccgacggacactttcacccttctccactgatgggaggttttggactcaaacacccgcctcctcaaatcatgatcaaaaacactcctgttccagccaatcctcctacaaacttcagcgcggcaaagtttgcttccttcatcacacagtattccacgggacaggtcagcgtggagatcgagtgggagctgcagaaggagaacagcaaacgctggaaccccgagatccagtacacttccaactacaacaaatctgttaatgtggactttactgtggacactaatggtgtgtattcagagcctcgccccattggcaccagatacctgactcgtaatctgtaa

SEQ ID NO: 4412 - DNA, 2208 bp, Artificial Sequence
  Description of Artificial Sequence: Synthetic polynucleotide
atggctgccgatggttatcttccagattggctcgaggacactctctctgaaggaataagacagtggtggaagctcaaacctggcccaccaccaccaaagcccgcagagcggcatcaggacgacagcaggggtcttgtgcttcctgggtacaagtacctcggacccttcaacggactcgacaaaggagagccggtcaacgaggcagacgctgcggccctcgagcacgacaaggcctacgaccggcagctcgacagcggagacaacccgtacctcaagtacaaccacgccgacgcggagtttcaggagcgtcttaaagaagatacgtcttttgggggcaacctcggacgagcagtcttccaggcgaaaaagagggttcttgaacctctgggcctggttgaggaacctgttaagacggctccgggaaaaaagaggccggtagagcactctcctgcggagccagactcctcctcgggaaccggaaaagcgggccagcagcctgcaagaaagagattgaatttcggtcagactggagacgcagactccgtacctgacccccagcctctcggacagccaccagcagcccccacaagtttgggatctactacaatggctacaggcagtggcgcaccaatggcagacaataacgagggtgccgatggagtgggtaattcctcaggaaattggcattgcgattcccaatggctgggcgacagagtcatcaccaccagcacccgaacctgggccctgcccacctacaacaaccacctctacaagcaaatctccagccaatcaggagcatcgaacgacaaccactactttggctacagcaccccttgggggtattttgacttcaacagattccactgtcacttctccccacgtgactggcaaagactcatcaacaacaactggggattccgacccaagagactcaacttcaagctctttaacattcaagtcaaagaggtcacgcagaatggcggtacgacgacgattgccaataaccttaccagcacggttcaggtgtttactgactcggagtaccagctcccgtacgtcctcggctcggcgcatcaaggatgcctcccgccgtttccagcggacgtcttcatggtcccacagtatggatacctcaccctgaacaacgggagtcaggcggtaggacgctcttccttttactgcctggagtactttccttctcagatgctgcgtaccggaaacaactttaccttcagctacacctttgaggacgtgcctttccacagcagctacgctcacagccagagtttggaccggctgatgaatcctctgatcgaccagtatctgtattatctgaacaggacacaatcaaatagtggaactcttcagcagtctaggctactgtttagccaagctggacccaccagcatgtctcttcaagctaaaaactggctgcctggaccttgctacagacagcagcgtctgtcaaagcaggcaaacgacaacaacaacagcaactttccctggactgcggctacaaagtatcatctaaatggtcgggactcgttggttaatccaggaccagctatggccagccacaaagacgatgaagaaaagtttttccccatgcatggaaccctgatatttggtaaacaaggaacaaatgctaacgacgcggatttggaacatgtcatgattacagatgaagaagaaatcaggaccaccaatcccgtggctacagagcagtacggaaacgtgtcaaataatttgcaaaactcaaatactggtccaactacagaaaatgtcaatcaccagggagcgttacctggtatggtgtggcaggatcgagacgtgtacctgcagggacccatttgggccaagattcctcacaccgacggacactttcacccttctccactgatgggaggttttggactcaaacacccgcctcctcaaatcatgatcaaaaacactcctgttccagccaatcctcctacaaacttcagcgcggcaaagtttgcttccttcatcacacagtattccacgggacaggtcagcgtggagatcgagtgggagctgcagaaggagaacagcaaacgctggaaccccgagatccagtacacttccaactacaacaaatctgttaatgtggactttactgtggacactaatggtgtgtattcagagcctcgccccattggcaccagatacctgactcgtaatctgtaa

SEQ ID NO: 4413 - DNA, 2208 bp, Artificial Sequence
  Description of Artificial Sequence: Synthetic polynucleotide
atggctgccgatggttatcttccagattggctcgaggacactctctctgaaggaataagacagtggtggaagctcaaacctggcccaccaccaccaaagcccgcagagcggcatcaggacgacagcaggggtcttgtgcttcctgggtacaagtacctcggacccttcaacggactcgacaaaggagagccggtcaacgaggcagacgctgcggccctcgagcacgacaaggcctacgaccggcagctcgacagcggagacaacccgtacctcaagtacaaccacgccgacgcggagtttcaggagcgtcttaaagaagatacgtcttttgggggcaacctcggacgagcagtcttccaggcgaaaaagagggttcttgaacctctgggcctggttgaggaacctgttaagacggctccgggaaaaaagaggccggtagagcactctcctgcggagccagactcctcctcgggaaccggaaaagcgggccagcagcctgcaagaaagagattgaatttcggtcagactggagacgcagactccgtacctgacccccagcctctcggacagccaccagcagcccccacaagtttgggatctactacaatggctacaggcagtggcgcaccaatggcagacaataacgagggtgccgatggagtgggtaattcctcaggaaattggcattgcgattcccaatggctgggcgacagagtcatcaccaccagcacccgaacctgggccctgcccacctacaacaaccacctctacaagcaaatctccagccaatcaggagcatcgaacgacaaccactactttggctacagcaccccttgggggtattttgacttcaacagattccactgtcacttctccccacgtgactggcaaagactcatcaacaacaactggggattccgacccaagagactcaacttcaagctctttaacattcaagtcaaagaggtcacgcagaatgacggtacgacgacgattgccaataaccttaccagcacggttcaggtgtttactgactcggagtaccagctcccgtacgtcctcggctcggcgcatcaaggatgcctcccgccgtttccagcggacgtcttcatggtcccacagtatggatacctcaccctgaacaacgggagtcaggcggtaggacgctcttccttttactgcctggagtactttccttctcagatgctgcgtaccggaaacaactttaccttcagctacacctttgaggacgtgcctttccacagcagctacgctcacagccagagtttggaccggctgatgaatcctctgatcgaccagtatctgtattatctgaacaggacacaatcaaatagtggaactcttcagcagtctaggctactgtttagccaagctggacccaccagcatgtctcttcaagctaaaaactggctgcctggaccttgctacagacagcagcgtctgtcaaagcaggcaaacgacaacaacaacagcaactttccctggactgcggctacaaagtatcatctaaatggtcgggactcgttggttaatccaggaccagctatggccagccacaaagacgatgaagaaaagtttttccccatgcatggaaccctgatatttggtaaacaaggaacaaatgctaacgacgcggatttggaacatgtcatgattacagatgaagaagaaatcaggaccaccaatcccgtggctacagagcagtacggaaacgtgtcaaataatttgcaaaactcaaatactggtccaactacagaaaatgtcaatcaccagggagcgttacctggtatggtgtggcaggatcgagacgtgtacctgcagggacccatttgggccaagattcctcacaccgacggacactttcacccttctccactgatgggaggttttggactcaaacacccgcctcctcaaatcatgatcaaaaacactcctgttccagccaatcctcctacaaacttcagcgcggcaaagtttgcttccttcatcacacagtattccacgggacaggtcagcgtggagatcgagtgggagctgcggaaggagaacagcaaacgctggaaccccgagatccagtacacttccaactacaacaaatctgttaatgtggactttactgtggacactaatggcgtgtattcagagcctcgccccattggcaccagatacctgactcgtaatctgtaa

SEQ ID NO: 4414 - DNA, 2208 bp, Artificial Sequence
  Description of Artificial Sequence: Synthetic polynucleotide
atggctgccgatggttatcttccagattggctcgaggacactctctctgaaggaataagacagtggtggaagctcaaacctggcccaccaccaccaaagcccgcagagcggcatcaggacgacagcaggggtcttgtgcttcctgggtacaagtacctcggacccttcaacggactcgacaaaggagagccggtcaacgaggcagacgctgcggccctcgagcacgacaaggcctacgaccggcagctcgacagcggagacaacccgtacctcaagtacaaccacgccgacgcggagtttcaggagcgtcttaaagaagatacgtcttttgggggcaacctcggacgagcagtcttccaggcgaaaaggagggttcttgaacctctgggcctggttgaggaacctgttaagacggctccgggaaaaaagaggccggtagagcactctcctgcggagccagactcctcctcgggaaccggaaaagcgggccagcagcctgcaagaaagagattgaatttcggtcagactggagacgcagactccgtacctgacccccagcctctcggacagccaccagcagcccccacaagtttgggatctactacaatggctacaggcagtggcgcaccaatggcagacaataacgagggtgccgatggagtgggtaattcctcaggaaattggcattgcgattcccaatggctgggcgacagagtcatcaccaccagcacccgaacctgggccctgcccacctacaacaaccacctctacaagcaaatctccagccaatcaggagcatcgaacgacaaccactactttggctacagcaccccttgggggtattttgacttcaacagattccactgtcacttctccccacgtgactggcaaagactcatcaacaacaactggggattccgacccaagagactcaacttcaagctctttaacattcaagtcaaagaggtcacgcagaatgacggtacgacgacgattgccaataaccttaccagcacggttcaggtgtttactgactcggagtaccagctcccgtacgtcctcggctcggcgcatcaaggatgcctcccgccgtttccagcggacgtcttcatggtcccacagtatggatacctcaccctgaacaacgggagtcaggcggtaggacgctcttccttttactgcctggagtactttccttctcagatgctgcgtaccggaaacaactttaccttcagctacacctttgaggacgtgcctttccacagcagctacgctcacagccagagtttggaccggctgatgaatcctctgatcgaccagtatctgtattatctgaacaggacacaatcaaatagtggaactcttcagcagtctaggctactgtttagccaagctggacccaccagcatgtctcttcaagctaaaaactggctgcctggaccttgctacagacagcagcgtctgtcaaagcaggcaaacgacaacaacaacagcaactttccctggactgcggctacaaagtatcatctaaatggtcgggactcgttggttaatccaggaccagctatggccagccacaaagacgatgaagaaaagtttttccccatgcatggaaccctgatatttggtaaacaaggaacaaatgctaacgacgcggatttggaacatgtcatgattacagatgaagaagaaatcaggaccaccaatcccgtggctacagagcagtacggaaacgtgtcaaataatttgcaaaactcaaatactggtccaactacagaaaatgtcaatcaccagggagcgttacctggtatggtgtggcaggatcgagacgtgtacctgcagggacccatttgggccaagattcctcacaccgacggacactttcacccttctccactgatgggaggttttggactcaaacacccgcctcctcaaatcatgatcaaaaacactcctgttccagccaatcctcctacaaacttcagcgcggcaaagtttgcttccttcatcacacagtattccacgggacaggtcagcgtggagatcgagtgggagctgcagaaggagaacagcaaacgctggaaccccgagatccagtacacttccaactacaacaaatctgttaatgtggactttactgtggacactaatggtgtgtattcagagcctcgccccattggcaccagatacctgactcgtaatctgtaa

SEQ ID NO: 4415 - DNA, 2208 bp, Artificial Sequence
  Description of Artificial Sequence: Synthetic polynucleotide
atggctgccgatggttatcttccagattggctcgaggacactctctctgaaggaataagacagtggtggaagctcaaacctggcccaccaccaccaaagcccgcagagcggcatcaggacgacagcaggggtcttgtgcttcctgggtacaagtacctcggacccttcaacggactcgacaaaggagagccggtcaacgaggcagacgctgcggccctcgagcacgacaaggcctacgaccggcagctcgacagcggagacaacccgtacctcaagtacaaccacgccgacgcggagcttcaggagcgtcttaaagaagatacgtcttttgggggcaacctcggacgagcagtcttccaggcgaaaaagagggttcttgaacctctgggcctggttgaggaacctgttaagacggctccgggaaaaaagaggccggtagagcactctcctgcggagccagactcctcctcgggaaccggaaaagcgggccagcagcctgcaagaaagagattgaatttcggtcagactggagacgcagactccgtacctgacccccagcctctcggacagccaccagcagcccccacaagtttgggatctactacaatggctacaggcagtggcgcaccaatggcagacaataacgagggtgccgatggagtgggtaattcctcaggaaattggcattgcgattcccaatggctgggcgacagagtcatcaccaccagcacccgaacctgggccctgcccacctacaacaaccacctctacaagcaaatctccagccaatcaggagcatcgaacgacaaccactactttggctacagcaccccttgggggtattttgacttcaacagattccactgtcacttctccccacgtgactggcaaagactcatcaacaacaactggggattccgacccaagagactcaacttcaagctctttaacattcaagtcaaagaggtcacgcagaatgacggtacgacgacgattgccaataaccttaccagcacggttcaggtgtttactgactcggagtaccagctcccgtacgtcctcggctcggcgcatcaaggatgcctcccgccgtttccagcggacgtcttcatggtcccacagtatggatacctcaccctgaacaacgggagtcaggcggtaggacgctcttccttttactgcctggagtactttccttctcagatgctgcgtaccggaaacaactttaccttcagctacacctttgaggacgtgcctttccacagcagctacgctcacagccagagtttggaccggctgatgaatcctctgatcgaccagtatctgtattatctgaacaggacacaatcaaatagtggaactcttcagcagtctaggctactgtttagccaagctggacccaccagcatgtctcttcaagctaaaaactggctgcctggaccttgctacagacagcagcgtctgtcaaagcaggcaaacgacaacaacaacagcaactttccctggactgcggctacaaagtatcatctaaatggtcgggactcgttggttaatccaggaccagctatggccagccacaaagacgatgaagaaaagtttttccccatgcatggaaccctgatatttggtaaacaaggaacaaatgctaacgacgcggatttggaacatgtcatgattacagatgaagaagaaatcaggaccaccaatcccgtggctacagagcagtacggaaacgtgtcaaataatttgcaaaactcaaatactggtccaactacagaaaatgtcaatcaccagggagcgttacctggtatggtgtggcaggatcgagacgtgtacctgcagggacccatttgggccaagattcctcacaccgacggacactttcacccttctccactgatgggaggttttggactcaaacacccgcctcctcaaatcatgatcaaaaacactcctgttccagccaatcctcctacaaacttcagcgcggcaaagtttgcttccttcatcacacagtattccacgggacaggtcagcgtggagatcgagtgggagctgcagaaggagaacagcaaacgctggaaccccgagatccagtacacttccaactacaacaaatctgttaatgtggactttactgtggacactaatggtgtgtattcagagcctcgccccattggcaccagatacctgactcgtaatctgtaa

SEQ ID NO: 4416 - DNA, 2208 bp, Artificial Sequence
  Description of Artificial Sequence: Synthetic polynucleotide
atggctgccgatggttatcttccagattggctcgaggacactctctctgaaggaataagacagtggtggaagctcaaacctggcccaccaccaccaaagcccgcagagcggcatcaggacgacagcaggggtcttgtgcttcctgggtacaagtacctcggacccttcaacggactcgacaaaggagagccggtcaacgaggcagacgctgcggccctcgagcacgacaaggcctacgaccggcagctcgacagcggagacaacccgtacctcaagtacaaccacgccgacgcggagtttcaggagcgtcttaaagaagatacgtcttttgggggcaacctcggacgagcagtcttccaggcgaaaaagagggttcttgaacctctgggcctggttgaggaacctgttaagacggctccgggaaaaaagaggccggtagagcactctcctgcggagccagactcctcctcgggaaccggaaaagcgggccagcagcctgcaagaaagagattgaatttcggtcagactggagacgcagactccgtacctgacccccagcctctcggacagccaccagcagcccccacaagtttgggatctactacaatggctacaggcagtggcgcaccaatggcagacaataacgagggtgccgatggagtgggtaattcctcaggaaattggcattgcgattcccaatggctgggcggcagagtcatcaccaccagcacccgaacctgggccctgcccacctacaacaaccacctctacaagcaaatctccagccaatcaggagcatcgaacgacaaccactactttggctacagcaccccttgggggtattttgacttcaacagattccactgtcacttctccccacgtgactggcaaagactcatcaacaacaactggggattccgacccaagagactcaacttcaagctctttaacattcaagtcaaagaggtcacgcagaatgacggtacgacgacgattgccaataaccttaccagcacggttcaggtgtttactgactcggagtaccagctcccgtacgtcctcggctcggcgcatcaaggatgcctcccgccgtttccagcggacgtcttcatggtcccacagtatggatacctcaccctgaacaacgggagtcaggcggtaggacgctcttccttttactgcctggagtactttccttctcagatgctgcgtaccggaaacaactttaccttcagctacacctttgaggacgtgcctttccacagcagctacgctcacagccagagtttggaccggctgatgaatcctctgatcgaccagtatctgtattatctgaacaggacacaatcaaatagtggaactcttcagcagtctaggctactgtttagccaagctggacccaccagcatgtctcttcaagctaaaaactggctgcctggaccttgctacagacagcagcgtctgtcaaagcaggcaaacgacaacaacaacagcaactttccctggactgcggctacaaagtatcatctaaatggtcgggactcgttggttaatccaggaccagctatggccagccacaaagacgatgaagaaaagtttttccccatgcatggaaccctgatatttggtaaacaaggaacaaatgctaacgacgcggatttggaacatgtcatgattacagatgaagaagaaatcaggaccaccaatcccgtggctacagagcagtacggaaacgtgtcaaataatttgcaaaactcaaatactggtccaactacagaaaatgtcaatcaccagggagcgttacctggtatggtgtggcaggatcgagacgtgtacctgcagggacccatttgggccaagattcctcacaccgacggacactttcacccttctccactgatgggaggttttggactcaaacacccgcctcctcaaatcatgatcaaaaacactcctgttccagccaatcctcctacaaacttcagcgcggcaaagtttgcttccttcatcacacagtattccacgggacaggtcagcgtggagatcgagtgggagctgcagaaggagaacagcaaacgctggaaccccgagatccagtacacttccaactacaacaaatctgttaatgtggactttactgtggacactaatggtgtgtattcagagcctcgccccattggcaccagatacctgactcgtaatctgtaa

SEQ ID NO: 4417 - DNA, 2208 bp, Artificial Sequence
  Description of Artificial Sequence: Synthetic polynucleotide
atggctgccgatggttatcttccagattggctcgaggacactctctctgaaggaataagacagtggtggaagctcaaacctggcccaccaccaccaaagcccgcagagcggcatcaggacgacagcaggggtcttgtgcttcctgggtacaagtacctcggacccttcaacggactcgacaaaggagagccggtcaacgaggcagacgctgcggccctcgagcacgacaaggcctacgaccggcagctcgacagcggagacaacccgtacctcaagtacaaccacgccgacgcggagtttcaggagcgtcttaaagaagatacgtcttttgggggcaacctcggacgagcagtcttccaggcgaaaaagagggttcttgaacctctgggcctggttgaggaacctgttaagacggctccgggaaaaaagaggccggtagagcactctcctgcggagccagactcctcctcgggaaccggaaaagcgggccagcagcctgcaagaaagagattgaatttcggtcagactggagacgcagactccgtacctgacccccagcctctcggacagccaccagcagcccccacaagtttgggatctactacaatggctacaggcagtggcgcaccaatggcagacaataacgagggtgccgatggagtgggtaattcctcaggaaattggcattgcgattcccaatggctgggcgacagagtcatcaccaccagcacccgaacctgggccctgcccacctacaacaaccacctctacaagcaaatctccagccaatcaggagcatcgaacgacaaccactactttggctacagcaccccttgggggtattttgacttcaacagattccactgtcacttctccccacgtgactggcaaagactcatcaacaacaactggggattccgacccaagagactcaacttcaagctctttaacattcaagtcaaagaggtcacgcagaatgacggtacgacgacgattgccaataaccttaccagcacggttcaggtgtttactgactcggagtaccagctcccgtacgtcctcggctcggcgcatcaaggatgcctcccgccgcttccagcggacgtcttcatggtcccacagtatggatacctcaccctgaacaacgggagtcaggcggtaggacgctcttccttttactgcctggagtactttccttctcagatgctgcgtaccggaaacaactttaccttcagctacacctttgaggacgtgcctttccacagcagctacgctcacagccagagtttggaccggctgatgaatcctctgatcgaccagtatctgtattatctgaacaggacacaatcaaatagtggaactcttcagcagtctaggctactgtttagccaagctggacccaccagcatgtctcttcaagctaaaaactggctgcctggaccttgctacagacagcagcgtctgtcaaagcaggcaaacgacaacaacaacagcaactttccctggactgcggctacaaagtatcatctaaatggtcgggactcgttggttaatccaggaccagctatggccagccacaaagacgatgaagaaaagtttttccccatgcatggaaccctgatatttggtaaacaaggaacaaatgctaacgacgcggatttggaacatgtcatgattacagatgaagaagaaatcaggaccaccaatcccgtggctacagagcagtacggaaacgtgtcaaataatttgcaaaactcaaatactggtccaactacagaaaatgtcaatcaccagggagcgttacctggtatggtgtggcaggatcgagacgtgtacctgcagggacccatttgggccaagattcctcacaccgacggacactttcacccttctccactgatgggaggttttggactcaaacacccgcctcctcaaatcatgatcaaaaacactcctgttccagccaatcctcctacaaacttcagcgcggcaaagtttgcttccttcatcacacagtattccacgggacaggtcagcgtggagatcgagtgggagctgcagaaggagaacagcaaacgctggaaccccgagatccagtacacttccaactacaacaaatctgttaatgtggactttactgtggacactaatggtgtgtattcagagcctcgccccattggcaccagatacctgactcgtaatctgtaa

SEQ ID NO: 4418 - DNA, 2208 bp, Artificial Sequence
  Description of Artificial Sequence: Synthetic polynucleotide
atggctgccgatggttatcttccagattggctcgaggacactctctctgaaggaataagacagtggtggaagctcaaacctggcccaccaccaccaaagcccgcagagcggcatcaggacgacagcaggggtcttgtgcttcctgggtacaagtacctcggacccttcaacggactcgacaaaggagagccggtcaacgaggcagacgctgcggccctcgagcacgacaaggcctacgaccggcagctcgacagcggagacaacccgtacctcaagtacaaccacgccgacgcggagtttcaggagcgtcttaaagaagatacgtcttttgggggcaacctcggacgagcagtcttccaggcgaaaaagagggttcttgaacctctgggcctggttgaggaacctgttaagacggctccgggaaaaaagaggccggtagagcactctcctgcggagccagactcctcctcgggaaccggaaaagcgggccagcagcctgcaagaaagagattgaatttcggtcagactggagacgcagactccgtacctgacccccagcctctcggacagccaccagcagcccccacaagtttgggatctactgcaatggctacaggcagtggcgcaccaatggcagacaataacgagggtgccgatggagtgggtaattcctcaggaaattggcattgcgattcccaatggctgggcgacagagtcatcaccaccagcacccgaacctgggccctgcccacctacaacaaccacctctacaagcaaatctccagccaatcaggagcatcgaacgacaaccactactttggctacagcaccccttgggggtattttgacttcaacagattccactgtcacttctccccacgtgactggcaaagactcatcaacaacaactggggattccgacccaagagactcaacttcaagctctttaacattcaagtcaaagaggtcacgcagaatgacggtacgacgacgattgccaataaccttaccagcacggttcaggtgtttactgactcggagtaccagctcccgtacgtcctcggctcggcgcatcaaggatgcctcccgccgtttccagcggacgtcttcatggtcccacagtatggatacctcaccctgaacaacgggagtcaggcggtaggacgctcttccttttactgcctggagtactttccttctcagatgctgcgtaccggaaacaactttaccttcagctacacctttgaggacgtgcctttccacagcagctacgctcacagccagagtttggaccggctgatgaatcctctgatcgaccagtatctgtattatctgaacaggacacaatcaaatagtggaactcttcagcagtctaggctactgtttagccaagctggacccaccagcatgtctcttcaagctaaaaactggctgcctggaccttgctacagacagcagcgtctgtcaaagcaggcaaacgacaacaacaacagcaactttccctggactgcggctacaaagtatcatctaaatggtcgggactcgttggttaatccaggaccagctatggccagccacaaagacgatgaagaaaagtttttccccatgcatggaaccctgatatttggtaaacaaggaacaaatgctaacgacgcggatttggaacatgtcatgattacagatgaagaagaaatcaggaccaccaatcccgtggctacagagcagtacggaaacgtgtcaaataatttgcaaaactcaaatactggtccaactacagaaaatgtcaatcaccagggagcgttacctggtatggtgtggcaggatcgagacgtgtacctgcagggacccatttgggccaagattcctcacaccgacggacactttcacccttctccactgatgggaggttttggactcaaacacccgcctcctcaaatcatgatcaaaaacactcctgttccagccaatcctcctacaaacttcagcgcggcaaagtttgcttccttcatcacacagtattccacgggacaggtcagcgtggagatcgagtgggagctgcagaaggagaacagcaaacgctggaaccccgagatccagtacacttccaactacaacaaatctgttaatgtggactttactgtggacactaatggtgtgtattcagagcctcgccccattggcaccagatacctgactcgtaatctgtaa

SEQ ID NO: 4419 - DNA, 2208 bp, Artificial Sequence
  Description of Artificial Sequence: Synthetic polynucleotide
atggctgccgatggttatcttccagattggctcgaggacactctctctgaaggaataagacagtggtggaagctcaaacctggcccaccaccaccaaagcccgcagagcggcatcaggacgacagcaggggtcttgtgcttcctgggtacaagtacctcggacccttcaacggactcgacaaaggagagccggtcaacgaggcagacgctgcggccctcgagcacgacaaggcctacgaccggcagctcgacagcggagacaacccgtacctcaagtacaaccacgccgacgcggagtttcaggagcgtcttaaagaagatacgtcttttgggggcaacctcggacgagcagtcttccaggcgaaaaagagggttcttgaacctctgggcctggttgaggaacctgttaagacggctccgggaaaaaagaggccggtagagcactctcctgcggagccagactcctcctcgggaaccggaaaagcgggccagcagcctgcaagaaagagattgaatttcggtcagactggagacgcagactccgtacctgacccccagcctctcggacagccaccagcagcccccacaagtttgggatctactacaatggctacaggcagtggcgcaccaatggcagacaataacgagggtgccgatggagtgggtaattcctcaggaaattggcattgcgattcccaatggctgggcgacagagtcatcaccaccagcacccgaacctgggccctgcccacctacaacaaccacctctacaagcaaatctccagccaatcaggagcatcgaacgacaaccactactttggctacagcaccccttgggggtattttgacttcaacagattccactgtcacttctccccacgtgactggcaaagactcatcaacaacaactggggattccgacccaagagactcaacttcaagctctttaacattcaagtcaaagaggtcacgcagaatgacggtacgacgacgattgccaataaccttaccagcacggttcaggtgtttactgactcggagtaccagctcccgtacgtcctcggctcggcgcatcaaggatgcctcccgccgtttccagcggacgtcttcatggtcccacagtatggatacctcaccctgaacaacgggagtcaggcggtaggacgctcttccttttactgcctggagtactttccttctcagatgctgcgtaccggaaacaactttaccttcagctacacctttgaggacgtgcctttccacagcagctacgctcacagccagagtttggaccggctgatgaatcctctgatcgaccagtatctgtattatctgaacaggacacaatcaaatagtggaactcttcagcagtctaggctactgtttagccaagctggacccaccagcatgtctcttcaagctaaaaactggctgcctggaccttgctacagacagcagcgtctgtcaaggcaggcaaacgacaacaacaacagcaactttccctggactgcggctacaaagtatcatctaaatggtcgggactcgttggttaatccaggaccagctatggccagccacaaagacgatgaagaaaagtttttccccatgcatggaaccctgatatttggtaaacaaggaacaaatgctaacgacgcggatttggaacatgtcatgattacagatgaagaagaaatcaggaccaccaatcccgtggctacagagcagtacggaaacgtgtcaaataatttgcaaaactcaaatactggtccaactacagaaaatgtcaatcaccagggagcgttacctggtatggtgtggcaggatcgagacgtgtacctgcagggacccatttgggccaagattcctcacaccgacggacactttcacccttctccactgatgggaggttttggactcaaacacccgcctcctcaaatcatgatcaaaaacactcctgttccagccaatcctcctacaaacttcagcgcggcaaagtttgcttccttcatcacacagtattccacgggacaggtcagcgtggagatcgagtgggagctgcagaaggagaacagcaaacgctggaaccccgagatccagtacacttccaactacaacaaatctgttaatgtggactttactgtggacactaatggtgtgtattcagagcctcgccccattggcaccagatacctgactcgtaatctgtaa

SEQ ID NO: 4420 - DNA, 2208 bp, Artificial Sequence
  Description of Artificial Sequence: Synthetic polynucleotide
atggctgccgatggttatcttccagattggctcgaggacactctctctgaaggaataagacagtggtggaagctcaaacctggcccaccaccaccaaagcccgcagagcggcatcaggacgacagcaggggtcttgtgcttcctgggtacaagtacctcggacccttcaacggactcgacaaaggagagccggtcaacgaggcagacgctgcggccctcgagcacgacaaggcctacgaccggcagctcggcagcggagacaacccgtacctcaagtacaaccacgccgacgcggagtttcaggagcgtcttaaagaagatacgtcttttgggggcaacctcggacgagcagtcttccaggcgaaaaagagggttcttgaacctctgggcctggttgaggaacctgttaagacggctccgggaaaaaagaggccggtagagcactctcctgcggagccagactcctcctcgggaaccggaaaagcgggccagcagcctgcaagaaagagattgaatttcggtcagactggagacgcagactccgtacctgacccccagcctctcggacagccaccagcagcccccacaagtttgggatctactacaatggctacaggcagtggcgcaccaatggcagacaataacgagggtgccgatggagtgggtaattcctcaggaaattggcattgcgattcccaatggctgggcgacagagtcatcaccaccagcacccgaacctgggccctgcccacctacaacaaccacctctacaagcaaatctccagccaatcaggagcatcgaacgacaaccactactttggctacagcaccccttgggggtattttgacttcaacagattccactgtcacttctccccacgtgactggcaaagactcatcaacaacaactggggattccgacccaagagactcaacttcaagctctttaacattcaagtcaaagaggtcacgcagaatgacggtacgacgacgattgccaataaccttaccagcacggttcaggtgtttactgactcggagtaccagctcccgtacgtcctcggctcggcgcatcaaggatgcctcccgccgtttccagcggacgtcttcatggtcccacagtatggatacctcaccctgaacaacgggagtcaggcggtaggacgctcttccttttactgcctggagtactttccttctcagatgctgcgtaccggaaacaactttaccttcagctacacctttgaggacgtgcctttccacagcagctacgctcacagccagagtttggaccggctgatgaatcctctgatcgaccagtatctgtattatctgaacaggacacaatcaaatagtggaactcttcagcagtctaggctactgtttagccaagctggacccaccagcatgtctcttcaagctaaaaactggctgcctggaccttgctacagacagcagcgtctgtcaaagcaggcaaacgacaacaacaacagcaactttccctggactgcggctacaaagtatcatctaaatggtcgggactcgttggttaatccaggaccagctatggccagccacaaagacgatgaagaaaagtttttccccatgcatggaaccctgatatttggtaaacaaggaacaaatgctaacgacgcggatttggaacatgtcatgattacagatgaagaagaaatcaggaccaccaatcccgtggctacagagcagtacggaaacgtgtcaaataatttgcaaaactcaaatactggtccaactacagaaaatgtcaatcaccagggagcgttacctggtatggtgtggcaggatcgagacgtgtacctgcagggacccatttgggccaagattcctcacaccgacggacactttcacccttctccactgatgggaggttttggactcaaacacccgcctcctcaaatcatgatcaaaaacactcctgttccagccaatcctcctacaaacttcagcgcggcaaagtttgcttccttcatcacacagtattccacgggacaggtcagcgtggagatcgagtgggagctgcagaaggagaacagcaaacgctggaaccccgagatccagtacacttccaactacaacaaatctgttaatgtggactttactgtggacactaatggtgtgtattcagagcctcgccccattggcaccagatacctgactcgtaatctgtaa

SEQ ID NO: 4421 - DNA, 2208 bp, Artificial Sequence
  Description of Artificial Sequence: Synthetic polynucleotide
atggctgccgatggttatcttccagattggctcgaggacactctctctgaaggaataagacagtggtggaagctcaaacctggcccaccaccaccaaagcccgcagagcggcatcaggacgacagcaggggtcttgtgcttcctgggtacaagtacctcggacccttcaacggactcgacaaaggagagccggtcaacgaggcagacgctgcggccctcgagcacgacaaggcctacgaccggcagctcgacagcggagacaacccgtacctcaagtacaaccacgccgacgcggagtttcaggagcgtcttaaagaagatacgtcttttgggggcaacctcggacgagcagtcttccaggcgaaaaagagggttcttgaacctctgggcctggttgaggaacctgttaagacggctccgggaaaaaagaggccggtagagcactctcctgcggagccagactcctcctcgggaaccggaaaagcgggccagcagcctgcaagaaagagattgaatttcggtcagactggagacgcagactccgtacctgacccccagcctctcggacagccaccagcagcccccacaagtttgggatctactacaatggctacaggcagtggcgcaccaatggcagacaataacgagggtgccgatggagtgggtaattcctcaggaaattggcattgcgattcccaatggctgggcgacagagtcatcaccaccagcacccgaacctgggccctgcccacctacaacaaccacctctacaagcaaatctccagccaatcaggagcatcgaacgacaaccactactttggctacagcaccccttgggggtattttgacttcaacagattccactgtcacttctccccacgtgactggcaaagactcatcaacaacaactggggattccgacccaagagactcaacttcaagctctttaacattcaagtcaaagaggtcacgcagaatgacggtacgacgacgattgccaataaccttaccagcacggttcaggtgtttactgactcggagtaccagctcccgtacgtcctcggctcggcgcatcaaggatgcctcccgccgtttccagcggacgtcttcatggtcccacagtatggatacctcaccctgaacaacgggagtcaggcggtaggacgctcttccttttactgcctggagtactttccttctcagatgctgcgtaccggaaacaactttaccttcagctacacctttgaggacgtgcctttccacagcagctacgctcacagccagagtttggaccggctgatgaatcctctgatcgaccagtatctgcattatctgaacaggacacaatcaaatagtggaactcttcagcagtctaggctactgtttagccaagctggacccaccagcatgtctcttcaagctaaaaactggctgcctggaccttgctacagacagcagcgtctgtcaaagcaggcaaacgacaacaacaacagcaactttccctggactgcggctacaaagtatcatctaaatggtcgggactcgttggttaatccaggaccagctatggccagccacaaagacgatgaagaaaagtttttccccatgcatggaaccctgatatttggtaaacaaggaacaaatgctaacgacgcggatttggaacatgtcatgattacagatgaagaagaaatcaggaccaccaatcccgtggctacagagcagtacggaaacgtgtcaaataatttgcaaaactcaaatactggtccaactacagaaaatgtcaatcaccagggagcgttacctggtatggtgtggcaggatcgagacgtgtacctgcagggacccatttgggccaagattcctcacaccgacggacactttcacccttctccactgatgggaggttttggactcaaacacccgcctcctcaaatcatgatcaaaaacactcctgttccagccaatcctcctacaaacttcagcgcggcaaagtttgcttccttcatcacacagtattccacgggacaggtcagcgtggagatcgagtgggagctgcagaaggagaacagcaaacgctggaaccccgagatccagtacacttccaactacaacaaatctgttaatgtggactttactgtggacactaatggtgtgtattcagagcctcgccccattggcaccagatacctgactcgtaatctgtaa

SEQ ID NO: 4422 - DNA, 2208 bp, Artificial Sequence
  Description of Artificial Sequence: Synthetic polynucleotide
atggctgccgatggttatcttccagattggctcgaggacactctctctgaaggaataagacagtggtggaagctcaaacctggcccaccaccaccaaagcccgcagagcggcatcaggacgacagcaggggtcttgtgcttcctgggtacaagtacctcggacccttcaacggactcgacaaaggagagccggtcaacgaggcagacgctgcggccctcgagcacgacaaggcctacgaccggcagctcgacagcggagacaacccgtacctcaagtacaaccacgccgacgcggagtttcaggagcgtcttaaagaagatacgtcttttgggggcaacctcggacgagcagtcttccaggcgaaaaagagggttcttgaacctctgggcctggttgaggaacctgttaagacggctccgggaaaaaagaggccggtagagcaccctcctgcggagccagactcctcctcgggaaccggaaaagcgggccagcagcctgcaagaaagagattgaatttcggtcagactggagacgcagactccgtacctgacccccagcctctcggacagccaccagcagcccccacaagtttgggatctactacaatggctacaggcagtggcgcaccaatggcagacaataacgagggtgccgatggagtgggtaattcctcaggaaattggcattgcgattcccaatggctgggcgacagagtcatcaccaccagcacccgaacctgggccctgcccacctacaacaaccacctctacaagcaaatctccagccaatcaggagcatcgaacgacaaccactactttggctacagcaccccttgggggtattttgacttcaacagattccactgtcacttctccccacgtgactggcaaagactcatcaacaacaactggggattccgacccaagagactcaacttcaagctctttaacattcaagtcaaagaggtcacgcagaatgacggtacgacgacgattgccaataaccttaccagcacggttcaggtgtttactgactcggagtaccagctcccgtacgtcctcggctcggcgcatcaaggatgcctcccgccgtttccagcggacgtcttcatggtcccacagtatggatacctcaccctgaacaacgggagtcaggcggtaggacgctcttccttttactgcctggagtactttccttctcagatgctgcgtaccggaaacaactttaccttcagctacacctttgaggacgtgcctttccacagcagctacgctcacagccagagtttggaccggctgatgaatcctctgatcgaccagtatctgtattatctgaacaggacacaatcaaatagtggaactcttcagcagtctaggctactgtttagccaagctggacccaccagcatgtctcttcaagctaaaaactggctgcctggaccttgctacagacagcagcgtctgtcaaagcaggcaaacgacaacaacaacagcaactttccctggactgcggctacaaagtatcatctaaatggtcgggactcgttggttaatccaggaccagctatggccagccacaaagacgatgaagaaaagtttttccccatgcatggaaccctgatatttggtaaacaaggaacaaatgctaacgacgcggatttggaacatgtcatgattacagatgaagaagaaatcaggaccaccaatcccgtggctacagagcagtacggaaacgtgtcaaataatttgcaaaactcaaatactggtccaactacagaaaatgtcaatcaccagggagcgttacctggtatggtgtggcaggatcgagacgtgtacctgcagggacccatttgggccaagattcctcacaccgacggacactttcacccttctccactgatgggaggttttggactcaaacacccgcctcctcaaatcatgatcaaaaacactcctgttccagccaatcctcctacaaacttcagcgcggcaaagtttgcttccttcatcacacagtattccacgggacaggtcagcgtggagatcgagtgggagctgcagaaggagaacagcaaacgctggaaccccgagatccagtacacttccaactacaacaaatctgttaatgtggactttactgtggacactaatggtgtgtattcagagcctcgccccattggcaccagatacctgactcgtaatctgtaa

SEQ ID NO: 4423 - DNA, 2208 bp, Artificial Sequence
  Description of Artificial Sequence: Synthetic polynucleotide
atggctgccgatggttatcttccagattggctcgaggacactctctctgaaggaataagacagtggtggaagctcaaacctggcccaccaccaccaaagcccgcagagcggcatcaggacgacagcaggggtcttgtgcttcctgggtacaagtacctcggacccttcaacggactcgacaaaggagagccggtcaacgaggcagacgctgcggccctcgagcacgacaaggcctacgaccggcagctcgacagcggagacaacccgtacctcaagtacaaccacgccgacgcggagtttcaggagcgtcttaaagaagatacgtcttttgggggcaacctcggacgagcagtcttccaggcgaaaaagagggttcttgaacctctgggcctggttgaggaacctgttaagacggctccgggaaaaaagaggccggtagagcactctcctgcggagccagactcctcctcgggaaccggaaaagcgggccagcagcctgcaagaaagagattgaatttcggtcagactggagacgcagactccgtacctgacccccagcctctcggacagccaccagcagcccccacaagtttgggatctactacaatggctacaggcagtggcgcaccaatggcagacaataacgagggtgccgatggagtgggtaattcctcaggaaattggcattgcgattcccaatggctgggcgacagagtcatcaccaccagcacccgaacctgggccctgcccacctacaacaaccacctctacaagcaaatctccagccaatcaggagcatcgaacgacaaccactactttggctacagcaccccttgggggtattttgacttcaacagattccactgtcacttctccccacgtgactggcaaagactcatcaacaacaactggggattccgacccaagagactcaacttcaagctctttaacattcaagtcaaagaggtcacgcagaatgacggtacgacgacgattgccaataaccttaccagcacggttcaggtgtttactgactcggagtaccagctcccgtacgtcctcggctcggcgcatcaaggatgcctcccgccgtttccagcggacgtcttcatggtcccacagtatggatacctcaccctgaacaacgggagtcaggcggtaggacgctcttccttttactgcctggagtactttccttctcagatgctgcgtaccggaaacaactttaccttcagctacacctttgaggacgtgcctttccacagcagctacgctcacagccagagtttggaccggctgatgaatcctctgatcgaccagtatctgtattatctgaacaggacacaatcaaatagtggaactcttcagcagtctaggctactgtttagccaagctggacccaccagcatgtctcttcaagctaaaaactggctgcctggaccttgctacagacagcagcgtctgtcaaagcaggcaaacgacaacaacaacagcaactttccctggactgcggctacaaagtatcatctaaatggtcgggactcgttggttaatccaggaccagctatggccagccacaaagacgatgaagaaaagtttttccccatgcatggaaccctgatatttggtaaacaaggaacaaatgctaacgacgcggatttggaacatgtcatgattacagatgaagaagaaatcaggaccaccaatcccgtggctacagagcagtacggaaacgtgtcaaataatttgcaaaactcaaatactggtccaactacagaaaatgtcaatcaccagggagcgttacctggtatggtgtggcaggatcgagacgtgtacctgcagggacccatttgggccaagattcctcacaccgacggacactttcacccttctccactgatgggaggttttggactcaaacacccgcctcctcaaatcatgatcaaaaacactcctgttccagccaatcctcctacaaacttcagcgcggcaaagtttgcttccttcatcacacagtattccacgggacaggtcagcgtggagatcgagtgggagctgcagaaggagaacagcaaacgctggaaccccgagatccagtacacttccaactacaacaaatctgttaatgtggactttactgcggacactaatggtgtgtattcagagcctcgccccattggcaccagatacctgactcgtaatctgtaa

SEQ ID NO: 4424 - DNA, 2208 bp, Artificial Sequence
  Description of Artificial Sequence: Synthetic polynucleotide
atggctgccgatggttatcttccagattggctcgaggacactctctctgaaggaataagacagtggtggaagctcaaacctggcccaccaccaccaaagcccgcagagcggcatcaggacgacagcaggggtcttgtgcttcctgggtacaagtacctcggacccttcaacggactcgacaaaggagagccggtcaacgaggcagacgctgcggccctcgagcacgacaaggcctacgaccggcagctcgacagcggagacaacccgtacctcaagtacaaccacgccgacgcggagtttcaggagcgtcttaaagaagatacgtcttttgggggcaacctcggacgagcagtcttccaggcgaaaaagagggttcttgaacctctgggcctggttgaggaacctgttaagacggctccgggaaaaaagaggccggtagagcactctcctgcggagccagactcctcctcgggaaccggaaaagcgggccagcagcctgcaagaaagagattgaatttcggtcagactggagacgcagactccgtacctgacccccagcctctcggacagccaccagcagcccccacaagtttgggatctactacaatggctacaggcagtggcgcaccaatggcagacaataacgagggtgccgatggagtgggtaattcctcaggaaattggcattgcgattcccaatggctgggcgacagagtcatcaccaccagcacccgaacctgggccctgcccacctacaacaaccacctctacaagcaaatctccagccaatcaggagcatcgaacgacaaccactactttggctacagcaccccttgggggtattttgacttcaacagattccactgtcacttctccccacgtgactggcaaagactcatcaacaacaactggggattccgacccaagagactcaacttcaagctctttaacattcaagtcaaagaggtcacgcagaatgacggtacgacgacgattgccaataaccttaccagcacggttcaggtgtttactgactcggagtaccagctcccgtacgtcctcggctcggcgcatcaaggatgcctcccgccgtttccagcggacgtcttcatggtcccacagtatggatacctcaccctgaacaacgggagtcaggcggtaggacgctcttccttttactgcctggagtactttccttctcagatgctgcgtaccggaaacaactttaccttcagctacacctttgaggacgtgcctttccacagcagctacgctcacagccagagtttggaccggctgatgaatcctctgatcgaccagtatctgtattatctgaacaggacacaatcaaatagtggaactcttcggcagtctaggctactgtttagccaagctggacccaccagcatgtctcttcaagctaaaaactggctgcctggaccttgctacagacagcagcgtctgtcaaagcaggcaaacgacaacaacaacagcaactttccctggactgcggctacaaagtatcatctaaatggtcgggactcgttggttaatccaggaccagctatggccagccacaaagacgatgaagaaaagtttttccccatgcatggaaccctgatatttggtaaacaaggaacaaatgctaacgacgcggatttggaacatgtcatgattacagatgaagaagaaatcaggaccaccaatcccgtggctacagagcagtacggaaacgtgtcaaataatttgcaaaactcaaatactggtccaactacagaaaatgtcaatcaccagggagcgttacctggtatggtgtggcaggatcgagacgtgtacctgcagggacccatttgggccaagattcctcacaccgacggacactttcacccttctccactgatgggaggttttggactcaaacacccgcctcctcaaatcatgatcaaaaacactcctgttccagccaatcctcctacaaacttcagcgcggcaaagtttgcttccttcatcacacagtattccacgggacaggtcagcgtggagatcgagtgggagctgcagaaggagaacagcaaacgctggaaccccgagatccagtacacttccaactacaacaaatctgttaatgtggactttactgtggacactaatggtgtgtattcagagcctcgccccattggcaccagatacctgactcgtaatctgtaa

SEQ ID NO: 4425 - DNA, 2208 bp, Artificial Sequence
  Description of Artificial Sequence: Synthetic polynucleotide
atggctgccgatggttatcttccagattggctcgaggacactctctctgaaggaataagacagtggtggaagctcaaacctggcccaccaccaccaaagcccgcagagcggcatcaggacgacagcaggggtcttgtgcttcctgggtacaagtacctcggacccttcaacggactcgacaaaggagagccggtcaacgaggcagacgctgcggccctcgagcacgacaaggcctacgaccggcagctcgacagcggagacaacccgtacctcaagtacaaccacgccgacgcggagtttcaggagcgtcttaaagaagatacgtcttttgggggcaacctcggacgagcagtcttccaggcgaaaaagagggttcttgaacctctgggcctggttgaggaacctgttaagacggctccgggaaaaaagaggccggtagagcactctcctgcggagccagactcctcctcgggaaccggaaaagcgggccagcagcctgcaagaaagagattgaatttcggtcagactggagacgcagactccgtacctgacccccagcctctcggacagccaccagcagcccccacaagtttgggatctactacaatggctacaggcagtggcgcaccaatggcagacaataacgagggtgccgatggagtgggtaattcctcaggaaattggcattgcgattcccaatggctgggcgacagagtcatcaccaccagcacccgaacctgggccctgcccacctacaacaaccacctctacaagcaaatctccagccaatcaggagcatcgaacgacaaccactactttggctacagcaccccttgggggtattttgacttcaacagattccactgtcacttctccccacgtgactggcaaagactcatcaacaacaactggggattccgacccaagagactcaacttcaagctctttaacattcaagtcaaagaggtcacgcagaatgacggtacgacgacgattgccaataaccttaccagcacggttcaggtgtttactgactcggagtaccagctcccgtacgtcctcggctcggcgcatcaaggatgcctcccgccgtttccagcggacgtcttcatggtcccacagtatggatacctcaccctgaacaacgggagtcaggcggtaggacgctcttccttttactgcctggagtactttccttctcagatgctgcgtaccggaaacaactttaccttcagctacacctttgaggacgtgcctttccacagcagctacgctcacagccagagtttggaccggctgatgaatcctctgatcgaccagtatctgtattatctgaacaggacacaatcaaatagtggaactcttcagcagtctaggctactgtttagccaagctggacccaccagcatgtctcttcaagctaaaaactggctgcctggaccttgctacagacagcagcgtctgtcaaagcaggcaaacgacaacaacaacagcaactttccctggactgcggctacaaagtatcatctaaatggtcgggactcgttggttaatccaggaccagctatggccagccacaaagacgatgaagaaaagtttttccccatgcatggaaccctgatatttggtaaacaaggaacaaatgctaacgacgcggatttggaacatgtcatgattacagatgaagaagaaatcaggaccaccaatcccgtggctacagagcagtacggaaacgtgtcaaataatttgcaaaactcaaatactggtccaactacagaaaatgtcaatcaccagggagcgttacctggtatggtgtggcaggatcgagacgtgtacctgcagggacccatttgggccaagattcctcacaccgacggacactttcacccttctccactgatgggaggttttggactcaaacacccgcctcctcaaatcatgatcaaaaacactcctgttccagccaatcctcctacaaacttcagcgcggcaaagtttgcttccttcatcacacagtattccacgggacgggtcagcgtggagatcgagtgggagctgcagaaggagaacagcaaacgctggaaccccgagatccagtacacttccaactacaacaaatctgttaatgtggactttactgtggacactaatggtgtgtattcagagcctcgccccattggcaccagatacctgactcgtaatctgtaa

SEQ ID NO: 4426 - DNA, 2208 bp, Artificial Sequence
  Description of Artificial Sequence: Synthetic polynucleotide
atggctgccgatggttatcttccagattggctcgaggacactctctctgaaggaataagacagtggtggaagctcaaacctggcccaccaccaccaaagcccgcagagcggcatcaggacgacagcaggggtcttgtgcttcctgggtacaagtacctcggacccttcaacggactcgacaaaggagagccggtcaacgaggcagacgctgcggccctcgagcacgacaaggcctacgaccggcagctcgacagcggagacaacccgtacctcaagtacaaccacgccgacgcggagtttcaggagcgtcttaaagaagatacgtcttttgggggcaacctcggacgagcagtcttccgggcgaaaaagagggttcttgaacctctgggcctggttgaggaacctgttaagacggctccgggaaaaaagaggccggtagagcactctcctgcggagccagactcctcctcgggaaccggaaaagcgggccagcagcctgcaagaaagagattgaatttcggtcagactggagacgcagactccgtacctgacccccagcctctcggacagccaccagcagcccccacaagtttgggatctactacaatggctacaggcagtggcgcaccaatggcagacaataacgagggtgccgatggagtgggtaattcctcaggaaattggcattgcgattcccaatggctgggcgacagagtcatcaccaccagcacccgaacctgggccctgcccacctacaacaaccacctctacaagcaaatctccagccaatcaggagcatcgaacgacaaccactactttggctacagcaccccttgggggtattttgacttcaacagattccactgtcacttctccccacgtgactggcaaagactcatcaacaacaactggggattccgacccaagagactcaacttcaagctctttaacattcaagtcaaagaggtcacgcagaatgacggtacgacgacgattgccaataaccttaccagcacggttcaggtgtttactgactcggagtaccagctcccgtacgtcctcggctcggcgcatcaaggatgcctcccgccgtttccagcggacgtcttcatggtcccacagtatggatacctcaccctgaacaacgggagtcaggcggtaggacgctcttccttttactgcctggagtactttccttctcagatgctgcgtaccggaaacaactttaccttcagctacacctttgaggacgtgcctttccacagcagctacgctcacagccagagtttggaccggctgatgaatcctctgatcgaccagtatctgtattatctgaacaggacacaatcaaatagtggaactcttcagcagtctaggctactgtttagccaagctggacccaccagcatgtctcttcaagctaaaaactggctgcctggaccttgctacagacagcagcgtctgtcaaagcaggcaaacgacaacaacaacagcaactttccctggactgcggctacaaagtatcatctaaatggtcgggactcgttggttaatccaggaccagctatggccagccacaaagacgatgaagaaaagtttttccccatgcatggaaccctgatatttggtaaacaaggaacaaatgctaacgacgcggatttggaacatgtcatgattacagatgaagaagaaatcaggaccaccaatcccgtggctacagagcagtacggaaacgtgtcaaataatttgcaaaactcaaatactggtccaactacagaaaatgtcaatcaccagggagcgttacctggtatggtgtggcaggatcgagacgtgtacctgcagggacccatttgggccaagattcctcacaccgacggacactttcacccttctccactgatgggaggttttggactcaaacacccgcctcctcaaatcatgatcaaaaacactcctgttccagccaatcctcctacaaacttcagcgcggcaaagtttgcttccttcatcacacagtattccacgggacaggtcagcgtggagatcgagtgggagctgcagaaggagaacagcaaacgctggaaccccgagatccagtacacttccaactacaacaaatctgttaatgtggactttactgtggacactaatggtgtgtattcagagcctcgccccattggcaccagatacctgactcgtaatctgtaa

SEQ ID NO: 4427 - DNA, 2208 bp, Artificial Sequence
  Description of Artificial Sequence: Synthetic polynucleotide
atggctgccgatggttatcttccagattggctcgaggacactctctctgaaggaataagacagtggtggaagcccaaacctggcccaccaccaccaaagcccgcagagcggcatcaggacgacagcaggggtcttgtgcttcctgggtacaagtacctcggacccttcaacggactcgacaaaggagagccggtcaacgaggcagacgctgcggccctcgagcacgacaaggcctacgaccggcagctcgacagcggagacaacccgtacctcaagtacaaccacgccgacgcggagtttcaggagcgtcttaaagaagatacgtcttttgggggcaacctcggacgagcagtcttccaggcgaaaaagagggttcttgaacctctgggcctggttgaggaacctgttaagacggctccgggaaaaaagaggccggtagagcactctcctgcggagccagactcctcctcgggaaccggaaaagcgggccagcagcctgcaagaaagagattgaatttcggtcagactggagacgcagactccgtacctgacccccagcctctcggacagccaccagcagcccccacaagtttgggatctactacaatggctacaggcagtggcgcaccaatggcagacaataacgagggtgccgatggagtgggtaattcctcaggaaattggcattgcgattcccaatggctgggcgacagagtcatcaccaccagcacccgaacctgggccctgcccacctacaacaaccacctctacaagcaaatctccagccaatcaggagcatcgaacgacaaccactactttggctacagcaccccttgggggtattttgacttcaacagattccactgtcacttctccccacgtgactggcaaagactcatcaacaacaactggggattccgacccaagagactcaacttcaagctctttaacattcaagtcaaagaggtcacgcagaatgacggtacgacgacgattgccaataaccttaccagcacggttcaggtgtttactgactcggagtaccagctcccgtacgtcctcggctcggcgcatcaaggatgcctcccgccgtttccagcggacgtcttcatggtcccacagtatggatacctcaccctgaacaacgggagtcaggcggtaggacgctcttccttttactgcctggagtactttccttctcagatgctgcgtaccggaaacaactttaccttcagctacacctttgaggacgtgcctttccacagcagctacgctcacagccagagtttggaccggctgatgaatcctctgatcgaccagtatctgtattatctgaacaggacacaatcaaatagtggaactcttcagcagtctaggctactgtttagccaagctggacccaccagcatgtctcttcaagctaaaaactggctgcctggaccttgctacagacagcagcgtctgtcaaagcaggcaaacgacaacaacaacagcaactttccctggactgcggctacaaagtatcatctaaatggtcgggactcgttggttaatccaggaccagctatggccagccacaaagacgatgaagaaaagtttttccccatgcatggaaccctgatatttggtaaacaaggaacaaatgctaacgacgcggatttggaacatgtcatgattacagatgaagaagaaatcaggaccaccaatcccgtggctacagagcagtacggaaacgtgtcaaataatttgcaaaactcaaatactggtccaactacagaaaatgtcaatcaccagggagcgttacctggtatggtgtggcaggatcgagacgtgtacctgcagggacccatttgggccaagattcctcacaccgacggacactttcacccttctccactgatgggaggttttggactcaaacacccgcctcctcaaatcatgatcaaaaacactcctgttccagccaatcctcctacaaacttcagcgcggcaaagtttgcttccttcatcacacagtattccacgggacaggtcagcgtggagatcgagtgggagctgcagaaggagaacagcaaacgctggaaccccgagatccagtacacttccaactacaacaaatctgttaatgtggactttactgtggacactaatggtgtgtattcagagcctcgccccattggcaccagatacctgactcgtaatctgtaa

SEQ ID NO: 4428 - DNA, 2208 bp, Artificial Sequence
  Description of Artificial Sequence: Synthetic polynucleotide
atggctgccgatggttatcttccagattggctcgaggacactctctctgaaggaataagacagtggtggaagctcaaacctggcccaccaccaccaaagcccgcagagcggcatcaggacgacagcaggggtcttgtgcttcctgggtacaagtacctcggacccttcaacggactcgacaaaggagagccggtcaacgaggcagacgctgcggccctcgagcacgacaaggcctacgaccggcagctcgacagcggagacaacccgtacctcaagtacaaccacgccgacgcggagtttcaggagcgtcttaaagaagatacgtcttttgggggcaacctcggacgagcagtcttccaggcgaaaaagagggttcttgaacctctgggcctggttgaggaacctgttaagacggctccgggaaaaaagaggccggtagagcactctcctgcggagccagactcctcctcgggaaccggaaaagcgggccagcagcctgcaagaaagagattgaatttcggtcagactggagacgcagactccgtacctgacccccagcctctcggacagccaccagcagcccccacaagtttgggatctactacaatggctacaggcagtggcgcaccaatggcagacaataacgagggtgccgatggagtgggtaattcctcaggaaattggcattgcgattcccaatggctgggcgacagagtcatcaccaccagcacccgaacctgggccctgcccacctacaacaaccacctctacaagcaaatctccagccaatcaggagcatcgaacgacaaccactactttggctacagcaccccttgggggtattttgacttcaacagattccactgtcacttctccccacgtgactggcaaagactcatcaacaacaactggggattccgacccaagagactcaacttcaagctctttaacattcaagtcaaagaggtcacgcagaatgacggtacgacgacgattgccaataaccttaccagcacggttcaggtgtttactgactcggagtaccagctcccgtacgtcctcggctcggcgcatcaaggatgcctcccgccgtttccagcggacgtcttcatggtcccacagtatggatacctcaccctgaacaacgggagtcaggcggtaggacgctcttccttttactgcctggagtactttccttctcagatgctgcgtaccggaaacaactttaccttcagctacacctttgaggacgtgcctttccacagcagctacgctcacagccagagtttggaccggctgatgaatcctctgatcgaccagtatctgtattatctgaacaggacacaatcaaatagtggaactcttcagcagtctaggctactgtttagccaagctggacccaccagcatgtctcttcaagctaaaaactggctgcctggaccttgctacagacagcagcgtctgtcaaagcaggcaaacgacaacaacaacagcaactttccctggactgcggctacaaagtatcatctaaatggtcgggactcgttggttaatccaggaccagctatggccagccacaaagacgatgaagaaaagtttttccccatgcatggaaccctgatatttggtaaacaaggaacaaatgctaacgacgcggatttggaacatgtcatgattacagatgaagaagaaatcaggaccaccaatcccgtggctacagagcagtacggaaacgtgtcaaataatttgcaaaactcaaatactggtccaactacagaaaatgccaatcaccagggagcgttacctggtatggtgtggcaggatcgagacgtgtacctgcagggacccatttgggccaagattcctcacaccgacggacactttcacccttctccactgatgggaggttttggactcaaacacccgcctcctcaaatcatgatcaaaaacactcctgttccagccaatcctcctacaaacttcagcgcggcaaagtttgcttccttcatcacacagtattccacgggacaggtcagcgtggagatcgagtgggagctgcagaaggagaacagcaaacgctggaaccccgagatccagtacacttccaactacaacaaatctgttaatgtggactttactgtggacactaatggtgtgtattcagagcctcgccccattggcaccagatacctgactcgtaatctgtaa

SEQ ID NO: 4429 - DNA, 2208 bp, Artificial Sequence
  Description of Artificial Sequence: Synthetic polynucleotide
atggctgccgatggttatcttccagattggctcgaggacactccctctgaaggaataagacagtggtggaagctcaaacctggcccaccaccaccaaagcccgcagagcggcatcaggacgacagcaggggtcttgtgcttcctgggtacaagtacctcggacccttcaacggactcgacaaaggagagccggtcaacgaggcagacgctgcggccctcgagcacgacaaggcctacgaccggcagctcgacagcggagacaacccgtacctcaagtacaaccacgccgacgcggagtttcaggagcgtcttaaagaagatacgtcttttgggggcaacctcggacgagcagtcttccaggcgaaaaagagggttcttgaacctctgggcctggttgaggaacctgttaagacggctccgggaaaaaagaggccggtagagcactctcctgcggagccagactcctcctcgggaaccggaaaagcgggccagcagcctgcaagaaagagattgaatttcggtcagactggagacgcagactccgtacctgacccccagcctctcggacagccaccagcagcccccacaagtttgggatctactacaatggctacaggcagtggcgcaccaatggcagacaataacgagggtgccgatggagtgggtaattcctcaggaaattggcattgcgattcccaatggctgggcgacagagtcatcaccaccagcacccgaacctgggccctgcccacctacaacaaccacctctacaagcaaatctccagccaatcaggagcatcgaacgacaaccactactttggctacagcaccccttgggggtattttgacttcaacagattccactgtcacttctccccacgtgactggcaaagactcatcaacaacaactggggattccgacccaagagactcaacttcaagctctttaacattcaagtcaaagaggtcacgcagaatgacggtacgacgacgattgccaataaccttaccagcacggttcaggtgtttactgactcggagtaccagctcccgtacgtcctcggctcggcgcatcaaggatgcctcccgccgtttccagcggacgtcttcatggtcccacagtatggatacctcaccctgaacaacgggagtcaggcggtaggacgctcttccttttactgcctggagtactttccttctcagatgctgcgtaccggaaacaactttaccttcagctacacctttgaggacgtgcctttccacagcagctacgctcacagccagagtttggaccggctgatgaatcctctgatcgaccagtatctgtattatctgaacaggacacaatcaaatagtggaactcttcagcagtctaggctactgtttagccaagctggacccaccagcatgtctcttcaagctaaaaactggctgcctggaccttgctacagacagcagcgtctgtcaaagcaggcaaacgacaacaacaacagcaactttccctggactgcggctacaaagtatcatctaaatggtcgggactcgttggttaatccaggaccagctatggccagccacaaagacgatgaagaaaagtttttccccatgcatggaaccctgatatttggtaaacaaggaacaaatgctaacgacgcggatttggaacatgtcatgattacagatgaagaagaaatcaggaccaccaatcccgtggctacagagcagtacggaaacgtgtcaaataatttgcaaaactcaaatactggtccaactacagaaaatgtcaatcaccagggagcgttacctggtatggtgtggcaggatcgagacgtgtacctgcagggacccatttgggccaagattcctcacaccgacggacactttcacccttctccactgatgggaggttttggactcaaacacccgcctcctcaaatcatgatcaaaaacactcctgttccagccaatcctcctacaaacttcagcgcggcaaagtttgcttccttcatcacacagtattccacgggacaggtcagcgtggagatcgagtgggagctgcagaaggagaacagcaaacgctggaaccccgagatccagtacacttccaactacaacaaatctgttaatgtggactttactgtggacactaatggtgtgtattcagagcctcgccccattggcaccagatacctgactcgtaatctgtaa

SEQ ID NO: 4430 - DNA, 2208 bp, Artificial Sequence
  Description of Artificial Sequence: Synthetic polynucleotide
atggctgccgatggttatcttccagattggctcgaggacactctctctgaaggaataagacagtggtggaagctcaaacctggcccaccaccaccaaagcccgcagagcggcatcaggacgacagcaggggtcttgtgcttcctgggtacaagtacctcggacccttcaacggactcgacaaaggagagccggtcaacgaggcagacgctgcggccctcgagcacgacaaggcctacgaccggcagctcgacagcggagacaacccgtacctcaagtacaaccacgccgacgcggagtttcaggagcgtcttaaagaagatacgtcttttgggggcaacctcggacgagcagtcttccaggcgaaaaagagggttcttgaacctctgggcctggttgaggaacctgttaagacggctccgggaaaaaagaggccggtagagcactctcctgcggagccagactcctcctcgggaaccggaaaagcgggccagcagcctgcaagaaagagattgaatttcggtcagactggagacgcagactccgtacctgacccccagcctctcggacagccaccagcagcccccacaagtttgggatctactacaatggctacaggcagtggcgcaccaatggcagacaataacgagggtgccgatggagtgggtaattcctcaggaaattggcattgcgattcccaatggctgggcgacagagtcatcaccaccagcacccgaacctgggccctgcccacctacaacaaccacctctacaagcaaatctccagccaatcaggagcatcgaacgacaaccactactttggctacagcaccccttgggggtattttgacttcaacagattccactgtcacttctccccacgtgactggcaaagactcatcaacaacaactggggattccgacccaagagactcaacttcaggctctttaacattcaagtcaaagaggtcacgcagaatgacggtacgacgacgattgccaataaccttaccagcacggttcaggtgtttactgactcggagtaccagctcccgtacgtcctcggctcggcgcatcaaggatgcctcccgccgtttccagcggacgtcttcatggtcccacagtatggatacctcaccctgaacaacgggagtcaggcggtaggacgctcttccttttactgcctggagtactttccttctcagatgctgcgtaccggaaacaactttaccttcagctacacctttgaggacgtgcctttccacagcagctacgctcacagccagagtttggaccggctgatgaatcctctgatcgaccagtatctgtattatctgaacaggacacaatcaaatagtggaactcttcagcagtctaggctactgtttagccaagctggacccaccagcatgtctcttcaagctaaaaactggctgcctggaccttgctacagacagcagcgtctgtcaaagcaggcaaacgacaacaacaacagcaactttccctggactgcggctacaaagtatcatctaaatggtcgggactcgttggttaatccaggaccagctatggccagccacaaagacgatgaagaaaagtttttccccatgcatggaaccctgatatttggtaaacaaggaacaaatgctaacgacgcggatttggaacatgtcatgattacagatgaagaagaaatcaggaccaccaatcccgtggctacagagcagtacggaaacgtgtcaaataatttgcaaaactcaaatactggtccaactacagaaaatgtcaatcaccagggagcgttacctggtatggtgtggcaggatcgagacgtgtacctgcagggacccatttgggccaagattcctcacaccgacggacactttcacccttctccactgatgggaggttttggactcaaacacccgcctcctcaaatcatgatcaaaaacactcctgttccagccaatcctcctacaaacttcagcgcggcaaagtttgcttccttcatcacacagtattccacgggacaggtcagcgtggagatcgagtgggagctgcagaaggagaacagcaaacgctggaaccccgagatccagtacacttccaactacaacaaatctgttaatgtggactttactgtggacactaatggtgtgtattcagagcctcgccccattggcaccagatacctgactcgtaatctgtaa

SEQ ID NO: 4431 - DNA, 2208 bp, Artificial Sequence
  Description of Artificial Sequence: Synthetic polynucleotide
atggctgccgatggttatcttccagattggctcgaggacactctctctgaaggaataagacagtggtggaagctcaaacctggcccaccaccaccaaagcccgcagagcggcatcaggacgacagcaggggtcttgtgcttcctgggtacaagtacctcggacccttcaacggactcgacaaaggagagccggtcaacgaggcagacgctgcggccctcgagcacgacaaggcctacgaccggcagctcgacagcggagacaacccgtacctcaagtacaaccacgccgacgcggagtttcaggagcgtcttaaagaagatacgtcttttgggggcaacctcggacgagcagtcttccaggcgaaaaagagggttcttgaacctctgggcctggttgaggaacctgttaagacggctccgggaaaaaagaggccggtagagcactctcctgcggagccagactcctcctcgggaaccggaaaagcgggccagcagcctgcaagaaagagattgaatttcggtcaggctggagacgcagactccgtacctgacccccagcctctcggacagccaccagcagcccccacaagtttgggatctactacaatggctacaggcagtggcgcaccaatggcagacaataacgagggtgccgatggagtgggtaattcctcaggaaattggcattgcgattcccaatggctgggcgacagagtcatcaccaccagcacccgaacctgggccctgcccacctacaacaaccacctctacaagcaaatctccagccaatcaggagcatcgaacgacaaccactactttggctacagcaccccttgggggtattttgacttcaacagattccactgtcacttctccccacgtgactggcaaagactcatcaacaacaactggggattccgacccaagagactcaacttcaagctctttaacattcaagtcaaagaggtcacgcagaatgacggtacgacgacgattgccaataaccttaccagcacggttcaggtgtttactgactcggagtaccagctcccgtacgtcctcggctcggcgcatcaaggatgcctcccgccgtttccagcggacgtcttcatggtcccacagtatggatacctcaccctgaacaacgggagtcaggcggtaggacgctcttccttttactgcctggagtactttccttctcagatgctgcgtaccggaaacaactttaccttcagctacacctttgaggacgtgcctttccacagcagctacgctcacagccagagtttggaccggctgatgaatcctctgatcgaccagtatctgtattatctgaacaggacacaatcaaatagtggaactcttcagcagtctaggctactgtttagccaagctggacccaccagcatgtctcttcaagctaaaaactggctgcctggaccttgctacagacagcagcgtctgtcaaagcaggcaaacgacaacaacaacagcaactttccctggactgcggctacaaagtatcatctaaatggtcgggactcgttggttaatccaggaccagctatggccagccacaaagacgatgaagaaaagtttttccccatgcatggaaccctgatatttggtaaacaaggaacaaatgctaacgacgcggatttggaacatgtcatgattacagatgaagaagaaatcaggaccaccaatcccgtggctacagagcagtacggaaacgtgtcaaataatttgcaaaactcaaatactggtccaactacagaaaatgtcaatcaccagggagcgttacctggtatggtgtggcaggatcgagacgtgtacctgcagggacccatttgggccaagattcctcacaccgacggacactttcacccttctccactgatgggaggttttggactcaaacacccgcctcctcaaatcatgatcaaaaacactcctgttccagccaatcctcctacaaacttcagcgcggcaaagtttgcttccttcatcacacagtattccacgggacaggtcagcgtggagatcgagtgggagctgcagaaggagaacagcaaacgctggaaccccgagatccagtacacttccaactacaacaaatctgttaatgtggactttactgtggacactaatggtgtgtattcagagcctcgccccattggcaccagatacctgactcgtaatctgtaa

SEQ ID NO: 4432 - DNA, 2208 bp, Artificial Sequence
  Description of Artificial Sequence: Synthetic polynucleotide
atggctgccgatggttatcttccagattggctcgaggacactctctctgaaggaataagacagtggtggaagctcaaacctggcccaccaccaccaaagcccgcagagcggcatcaggacgacagcaggggtcttgtgcttcctgggtacaagtacctcggacccttcaacggactcgacaaaggagagccggtcaacgaggcagacgctgcggccctcgagcacgacaaggcctacgaccggcagctcgacagcggagacaacccgtacctcaagtacaaccacgccgacgcggagtttcaggagcgtcttaaagaagatacgtcttttgggggcaacctcggacgagcagtcttccaggcgaaaaagagggttcttgaacctctgggcctggttgaggaacctgttaagacggctccgggaaaaaagaggccggtagagcactctcctgcggagccagactcctcctcgggaaccggaaaagcgggccagcagcctgcaagaaagagattgaatttcggtcagactggagacgcagactccgtacctgacccccagcctctcggacagccaccagcagcccccacaagtttgggatctactacagtggctacaggcagtggcgcaccaatggcagacaataacgagggtgccgatggagtgggtaattcctcaggaaattggcattgcgattcccaatggctgggcgacagagtcatcaccaccagcacccgaacctgggccctgcccacctacaacaaccacctctacaagcaaatctccagccaatcaggagcatcgaacgacaaccactactttggctacagcaccccttgggggtattttgacttcaacagattccactgtcacttctccccacgtgactggcaaagactcatcaacaacaactggggattccgacccaagagactcaacttcaagctctttaacattcaagtcaaagaggtcacgcagaatgacggtacgacgacgattgccaataaccttaccagcacggttcaggtgtttactgactcggagtaccagctcccgtacgtcctcggctcggcgcatcaaggatgcctcccgccgtttccagcggacgtcttcatggtcccacagtatggatacctcaccctgaacaacgggagtcaggcggtaggacgctcttccttttactgcctggagtactttccttctcagatgctgcgtaccggaaacaactttaccttcagctacacctttgaggacgtgcctttccacagcagctacgctcacagccagagtttggaccggctgatgaatcctctgatcgaccagtatctgtattatctgaacaggacacaatcaaatagtggaactcttcagcagtctaggctactgtttagccaagctggacccaccagcatgtctcttcaagctaaaaactggctgcctggaccttgctacagacagcagcgtctgtcaaagcaggcaaacgacaacaacaacagcaactttccctggactgcggctacaaagtatcatctaaatggtcgggactcgttggttaatccaggaccagctatggccagccacaaagacgatgaagaaaagtttttccccatgcatggaaccctgatatttggtaaacaaggaacaaatgctaacgacgcggatttggaacatgtcatgattacagatgaagaagaaatcaggaccaccaatcccgtggctacagagcagtacggaaacgtgtcaaataatttgcaaaactcaaatactggtccaactacagaaaatgtcaatcaccagggagcgttacctggtatggtgtggcaggatcgagacgtgtacctgcagggacccatttgggccaagattcctcacaccgacggacactttcacccttctccactgatgggaggttttggactcaaacacccgcctcctcaaatcatgatcaaaaacactcctgttccagccaatcctcctacaaacttcagcgcggcaaagtttgcttccttcatcacacagtattccacgggacaggtcagcgtggagatcgagtgggagctgcagaaggagaacagcaaacgctggaaccccgagatccagtacacttccaactacaacaaatctgttaatgtggactttactgtggacactaatggtgtgtattcagagcctcgccccattggcaccagatacctgactcgtaatctgtaa

SEQ ID NO: 4433 - DNA, 2208 bp, Artificial Sequence
  Description of Artificial Sequence: Synthetic polynucleotide
atggctgccgatggttatcttccagattggctcgaggacactctctctgaaggaataagacagtggtggaagctcaaacctggcccaccaccaccaaagcccgcagagcggcatcaggacgacagcaggggtcttgtgcttcctgggtacaagtacctcggacccttcaacggactcgacaaaggagagccggtcaacgaggcagacgctgcggccctcgagcacgacaaggcctacgaccggcagctcgacagcggagacaacccgtacctcaagtacaaccacgccgacgcggagtttcaggagcgtcttaaagaagatacgtcttttgggggcaacctcggacgagcagtcttccaggcgaaaaagagggttcttgaacctctgggcctggttgaggaacctgttaagacggctccgggaaaaaagaggccggtagagcactctcctgcggagccagactcctcctcgggaaccggaaaagcgggccagcagcctgcaagaaagagattgaatttcggtcagactggagacgcagactccgtacctgacccccagcctctcggacagccaccagcagcccccacaagtttgggatctactacaatggctacaggcagtggcgcaccaatggcagacaataacgagggtgccgatggagtgggtaattcctcaggaaattggcattgcgattcccaatggctgggcgacagagtcatcaccaccagcacccgaacctgggccctgcccacctacaacaaccacctctacaagcaaatctccagccaatcaggagcatcgaacgacaaccactactttggctacagcaccccttgggggtattttgacttcaacagattccactgtcacttctccccacgtgactggcaaagactcatcaacaacaactggggattccgacccaagagactcaacttcaagctctttaacattcaagtcaaagaggtcacgcagaatgacggtacgacgacgattgccaataaccttaccagcacggttcaggtgtttactgactcggagtaccagctcccgtacgtcctcggctcggcgcatcaaggatgcctcccgccgtttccagcggacgtcttcatggtcccacagtatggatacctcaccctgaacaacgggagtcaggcggtaggacgctcttccttttactgcctggagtactttccttctcagatgctgcgtaccggaaacaactttaccttcagctacacctttgaggacgtgcctttccacagcagctacgctcacagccagagtttggaccggctgatgaatcctctgatcgaccagtatctgtattatctgaacaggacacaatcaaatagtggaactcttcagcagtctaggctactgtttagccaagctggacccaccagcatgtctcttcaagctaaaaactggctgcctggaccttgctacagacagcagcgtctgtcaaagcaggcaaacgacaacaacaacagcaactttccctggactgcggctacaaagtatcatctaaatggtcgggactcgttggttaatccaggaccagctatggccagccacaaaggcgatgaagaaaagtttttccccatgcatggaaccctgatatttggtaaacaaggaacaaatgctaacgacgcggatttggaacatgtcatgattacagatgaagaagaaatcaggaccaccaatcccgtggctacagagcagtacggaaacgtgtcaaataatttgcaaaactcaaatactggtccaactacagaaaatgtcaatcaccagggagcgttacctggtatggtgtggcaggatcgagacgtgtacctgcagggacccatttgggccaagattcctcacaccgacggacactttcacccttctccactgatgggaggttttggactcaaacacccgcctcctcaaatcatgatcaaaaacactcctgttccagccaatcctcctacaaacttcagcgcggcaaagtttgcttccttcatcacacagtattccacgggacaggtcagcgtggagatcgagtgggagctgcagaaggagaacagcaaacgctggaaccccgagatccagtacacttccaactacaacaaatctgttaatgtggactttactgtggacactaatggtgtgtattcagagcctcgccccattggcaccagatacctgactcgtaatctgtaa

SEQ ID NO: 4434 - DNA, 2208 bp, Artificial Sequence
  Description of Artificial Sequence: Synthetic polynucleotide
atggctgccgatggttatcttccagattggctcgaggacactctctctgaaggaataagacagtggtggaagctcaaacctggcccaccaccaccaaagcccgcagagcggcatcaggacgacagcaggggtcttgtgcttcctgggtacaagtacctcggacccttcaacggactcgacaaaggagagccggtcaacgaggcagacgctgcggccctcgagcacgacaaggcctacgaccggcagctcgacagcggagacaacccgtacctcaagtacaaccacgccgacgcggagtttcaggagcgtcttaaagaagatacgtcttttgggggcaacctcggacgagcagtcttccaggcgaaaaagagggttcttgaacctctgggcctggttgaggaacctgttaagacggctccgggaaaaaagaggccggtagagcactctcctgcggagccagactcctcctcgggaaccggaaaagcgggccagcagcctgcaagaaagggattgaatttcggtcagactggagacgcagactccgtacctgacccccagcctctcggacagccaccagcagcccccacaagtttgggatctactacaatggctacaggcagtggcgcaccaatggcagacaataacgagggtgccgatggagtgggtaattcctcaggaaattggcattgcgattcccaatggctgggcgacagagtcatcaccaccagcacccgaacctgggccctgcccacctacaacaaccacctctacaagcaaatctccagccaatcaggagcatcgaacgacaaccactactttggctacagcaccccttgggggtattttgacttcaacagattccactgtcacttctccccacgtgactggcaaagactcatcaacaacaactggggattccgacccaagagactcaacttcaagctctttaacattcaagtcaaagaggtcacgcagaatgacggtacgacgacgattgccaataaccttaccagcacggttcaggtgtttactgactcggagtaccagctcccgtacgtcctcggctcggcgcatcaaggatgcctcccgccgtttccagcggacgtcttcatggtcccacagtatggatacctcaccctgaacaacgggagtcaggcggtaggacgctcttccttttactgcctggagtactttccttctcagatgctgcgtaccggaaacaactttaccttcagctacacctttgaggacgtgcctttccacagcagctacgctcacagccagagtttggaccggctgatgaatcctctgatcgaccagtatctgtattatctgaacaggacacaatcaaatagtggaactcttcagcagtctaggctactgtttagccaagctggacccaccagcatgtctcttcaagctaaaaactggctgcctggaccttgctacagacagcagcgtctgtcaaagcaggcaaacgacaacaacaacagcaactttccctggactgcggctacaaagtatcatctaaatggtcgggactcgttggttaatccaggaccagctatggccagccacaaagacgatgaagaaaagtttttccccatgcatggaaccctgatatttggtaaacaaggaacaaatgctaacgacgcggatttggaacatgtcatgattacagatgaagaagaaatcaggaccaccaatcccgtggctacagagcagtacggaaacgtgtcaaataatttgcaaaactcaaatactggtccaactacagaaaatgtcaatcaccagggagcgttacctggtatggtgtggcaggatcgagacgtgtacctgcagggacccatttgggccaagattcctcacaccgacggacactttcacccttctccactgatgggaggttttggactcaaacacccgcctcctcaaatcatgatcaaaaacactcctgttccagccaatcctcctacaaacttcagcgcggcaaagtttgcttccttcatcacacagtattccacgggacaggtcagcgtggagatcgagtgggagctgcagaaggagaacagcaaacgctggaaccccgagatccagtacacttccaactacaacaaatctgttaatgtggactttactgtggacactaatggtgtgtattcagagcctcgccccattggcaccagatacctgactcgtaatctgtaa

SEQ ID NO: 4435 - DNA, 2208 bp, Artificial Sequence
  Description of Artificial Sequence: Synthetic polynucleotide
atggctgccgatggttatcttccagattggctcgaggacactctctctgaaggaataagacagtggtggaagctcaaacctggcccaccaccaccaaagcccgcagagcggcatcaggacgacagcaggggtcttgtgcttcctgggtacaagtacctcggacccttcaacggactcgacaaaggagagccggtcaacgaggcagacgctgcggccctcgagcacgacaaggcctacgaccggcagctcgacagcggagacaacccgtacctcaagtacaaccacgccgacgcggagtttcaggagcgtcttaaagaagatacgtcttttgggggcaacctcggacgagcagtcttccaggcgaaaaagagggttcttgaacctctgggcctggttgaggaacctgttaagacggctccgggaaaaaagaggccggtagagcactctcctgcggagccagactcctcctcgggaaccggaaaagcgggccagcagcctgcaagaaagagattgaatttcggtcagactggagacgcagactccgtacctgacccccagcctctcggacagccaccagcagcccccacaagtttgggatctactacaatggctacaggcagtggcgcaccaatggcagacaataacgagggtgccgatggagtgggtaattcctcaggaaattggcattgcgattcccaatggctgggcgacagagtcatcaccaccagcacccgaacctgggccctgcccacctacaacaaccacctctacaagcaaatctccagccaatcaggagcatcgaacgacaaccactactttggctacagcaccccttgggggtattttgacttcaacagattccactgtcacttctccccacgtgactggcaaagactcatcaacaacaactggggattccgacccaagagactcaacttcaagctctttaacattcaagtcaaagaggtcacgcagaatgacggtacggcgacgattgccaataaccttaccagcacggttcaggtgtttactgactcggagtaccagctcccgtacgtcctcggctcggcgcatcaaggatgcctcccgccgtttccagcggacgtcttcatggtcccacagtatggatacctcaccctgaacaacgggagtcaggcggtaggacgctcttccttttactgcctggagtactttccttctcagatgctgcgtaccggaaacaactttaccttcagctacacctttgaggacgtgcctttccacagcagctacgctcacagccagagtttggaccggctgatgaatcctctgatcgaccagtatctgtattatctgaacaggacacaatcaaatagtggaactcttcagcagtctaggctactgtttagccaagctggacccaccagcatgtctcttcaagctaaaaactggctgcctggaccttgctacagacagcagcgtctgtcaaagcaggcaaacgacaacaacaacagcaactttccctggactgcggctacaaagtatcatctaaatggtcgggactcgttggttaatccaggaccagctatggccagccacaaagacgatgaagaaaagtttttccccatgcatggaaccctgatatttggtaaacaaggaacaaatgctaacgacgcggatttggaacatgtcatgattacagatgaagaagaaatcaggaccaccaatcccgtggctacagagcagtacggaaacgtgtcaaataatttgcaaaactcaaatactggtccaactacagaaaatgtcaatcaccagggagcgttacctggtatggtgtggcaggatcgagacgtgtacctgcagggacccatttgggccaagattcctcacaccgacggacactttcacccttctccactgatgggaggttttggactcaaacacccgcctcctcaaatcatgatcaaaaacactcctgttccagccaatcctcctacaaacttcagcgcggcaaagtttgcttccttcatcacacagtattccacgggacaggtcagcgtggagatcgagtgggagctgcagaaggagaacagcaaacgctggaaccccgagatccagtacacttccaactacaacaaatctgttaatgtggactttactgtggacactaatggtgtgtattcagagcctcgccccattggcaccagatacctgactcgtaatctgtaa

SEQ ID NO: 4436 - DNA, 2208 bp, Artificial Sequence
  Description of Artificial Sequence: Synthetic polynucleotide
atggctgccgatggttatcttccagattggctcgaggacactctctctgaaggaataagacagtggtggaagctcaaacctggcccaccaccaccaaagcccgcagagcggcatcaggacgacagcaggggtcttgtgcttcctgggtacaagtacctcggacccttcaacggactcgacaaaggagagccggtcaacgaggcagacgctgcggccctcgagcacgacaaggcctacgaccggcagctcgacagcggagacaacccgtacctcaagtacaaccacgccgacgcggagtttcaggagcgtcttaaagaagatacgtcttttgggggcaacctcggacgagcagtcttccaggcgaaaaagagggttcttgaacctctgggcctggttgaggaacctgttaagacggctccgggaaaaaagaggccggtagagcactctcctgcggagccagactcctcctcgggaaccggaaaagcgggccagcagcctgcaagaaggagattgaatttcggtcagactggagacgcagactccgtacctgacccccagcctctcggacagccaccagcagcccccacaagtttgggatctactacaatggctacaggcagtggcgcaccaatggcagacaataacgagggtgccgatggagtgggtaattcctcaggaaattggcattgcgattcccaatggctgggcgacagagtcatcaccaccagcacccgaacctgggccctgcccacctacaacaaccacctctacaagcaaatctccagccaatcaggagcatcgaacgacaaccactactttggctacagcaccccttgggggtattttgacttcaacagattccactgtcacttctccccacgtgactggcaaagactcatcaacaacaactggggattccgacccaagagactcaacttcaagctctttaacattcaagtcaaagaggtcacgcagaatgacggtacgacgacgattgccaataaccttaccagcacggttcaggtgtttactgactcggagtaccagctcccgtacgtcctcggctcggcgcatcaaggatgcctcccgccgtttccagcggacgtcttcatggtcccacagtatggatacctcaccctgaacaacgggagtcaggcggtaggacgctcttccttttactgcctggagtactttccttctcagatgctgcgtaccggaaacaactttaccttcagctacacctttgaggacgtgcctttccacagcagctacgctcacagccagagtttggaccggctgatgaatcctctgatcgaccagtatctgtattatctgaacaggacacaatcaaatagtggaactcttcagcagtctaggctactgtttagccaagctggacccaccagcatgtctcttcaagctaaaaactggctgcctggaccttgctacagacagcagcgtctgtcaaagcaggcaaacgacaacaacaacagcaactttccctggactgcggctacaaagtatcatctaaatggtcgggactcgttggttaatccaggaccagctatggccagccacaaagacgatgaagaaaagtttttccccatgcatggaaccctgatatttggtaaacaaggaacaaatgctaacgacgcggatttggaacatgtcatgattacagatgaagaagaaatcaggaccaccaatcccgtggctacagagcagtacggaaacgtgtcaaataatttgcaaaactcaaatactggtccaactacagaaaatgtcaatcaccagggagcgttacctggtatggtgtggcaggatcgagacgtgtacctgcagggacccatttgggccaagattcctcacaccgacggacactttcacccttctccactgatgggaggttttggactcaaacacccgcctcctcaaatcatgatcaaaaacactcctgttccagccaatcctcctacaaacttcagcgcggcaaagtttgcttccttcatcacacagtattccacgggacaggtcagcgtggagatcgagtgggagctgcagaaggagaacagcaaacgctggaaccccgagatccagtacacttccaactacaacaaatctgttaatgtggactttactgtggacactaatggtgtgtattcagagcctcgccccattggcaccagatacctgactcgtaatctgtaa

SEQ ID NO: 4437 - DNA, 2208 bp, Artificial Sequence
  Description of Artificial Sequence: Synthetic polynucleotide
atggctgccgatggttatcttccagattggctcgaggacactctctctgaaggaataagacagtggtggaagctcaaacctggcccaccaccaccaaagcccgcagagcggcatcaggacgacagcaggggtcttgtgcttcctgggtacaagtacctcggacccttcaacggactcgacaaaggagagccggtcaacgaggcagacgctgcggccctcgagcacgacaaggcctacgaccggcagctcgacagcggagacaacccgtacctcaagtacaaccacgccgacgcggagtttcaggagcgtcttaaagaagatacgtcttttgggggcaacctcggacgagcagtcttccaggcgaaaaagagggttcttgaacctctgggcctggttgaggaacctgttaagacggctccgggaaaaaagaggccggtagagcactctcctgcggagccagactcctcctcgggaaccggaaaagcgggccagcagcctgcaagaaagagattgaatttcggtcagactggagacgcagactccgtacctgacccccagcctctcggacagccaccagcagcccccacaagtttgggatctactacaatggctacaggcagtggcgcaccaatggcagacaataacgagggtgccgatggagtgggtaattcctcaggaaattggcattgcgattcccaatggctgggcgacagagtcatcaccaccagcacccgaacctgggccctgcccacctacaacaaccacctctacaagcaaatctccagccaatcaggagcatcgaacgacaaccactactttggctacagcaccccttgggggtattttgacttcaacagattccactgtcacttctccccacgtgactggcaaagactcatcaacaacaactggggattccgacccaagagactcaacttcaagctctttaacattcaagtcaaagaggtcacgcagaatgacggtacgacgacgattgccaataaccttaccagcacggttcaggtgtttactgactcggagtaccagctcccgtacgtcctcggctcggcgcatcaaggatgcctcccgccgtttccagcggacgtcttcatggtcccacagtatggatacctcaccctgaacaacgggagtcaggcggtaggacgctcttccttttactgcctggagtactttccttctcagatgctgcgtaccggaaacaactttaccttcagctacacctttgaggacgtgcctttccacagcagctacgctcacagccagagtttggaccggctgatgaatcctctgatcgaccagtatctgtattatctgaacaggacacaatcaaatagtggaactcttcagcagtctaggctactgtttagccaagctggacccaccagcatgtctcttcaagctaaaaactggctgcctggaccttgctacagacagcagcgtctgtcaaagcaggcaaacgacaacaacaacagcaactttccctggactgcggctacaaagtatcatctaaatggtcgggactcgttggttaatccaggaccagctatggccagccacaaagacgatgaagaaaagtttttccccatgcatggaaccctgatatttggtaaacaaggaacaaatgctaacgacgcggatttggaacatgtcatgattacagatgaagaagaaatcaggaccaccaatcccgtggctacagagcagtacggaaacgtgtcaaataatttgcaaaactcaaatactggtccaactacagaaaatgtcaatcaccagggagcgttacctggtatggtgtggcaggatcgagacgtgtacctgcagggacccatttgggccaagattcctcacaccgacggacactttcacccttctccactgatgggaggttttggactcaaacacccgcctcctcaaatcatgatcaaaaacactcctgttccagccaatcctcctacaaacttcagcgcggcaaagtttgcttccctcatcacacagtattccacgggacaggtcagcgtggagatcgagtgggagctgcagaaggagaacagcaaacgctggaaccccgagatccagtacacttccaactacaacaaatctgttaatgtggactttactgtggacactaatggtgtgtattcagagcctcgccccattggcaccagatacctgactcgtaatctgtaa

SEQ ID NO: 4438 - DNA, 2208 bp, Artificial Sequence
  Description of Artificial Sequence: Synthetic polynucleotide
atggctgccgatggttatcttccagattggctcgaggacactctctctgaaggaataagacagtggtggaagctcaaacctggcccaccaccaccaaagcccgcagagcggcatcaggacgacagcaggggtcttgtgcttcctgggtacaagtacctcggacccttcaacggactcgacaaaggagagccggtcaacgaggcagacgctgcggccctcgagcacgacaaggcctacgaccggcagctcgacagcggagacaacccgtacctcaagtacaaccacgccgacgcggagtttcaggagcgtcttaaagaagatacgtcttttgggggcaacctcggacgagcagtcttccaggcgaaaaagagggttcttgaacctctgggcctggttgaggaacctgttaagacggctccgggaaaaaagaggccggtagagcactctcctgcggagccagactcctcctcgggaaccggaaaagcgggccagcagcctgcaagaaagagattgaatttcggtcagactggagacgcagactccgtacctgacccccagcctctcggacagccaccagcagcccccacaagtttgggatctactacaatggctacaggcagtggcgcaccaatggcagacaataacgagggtgccgatggagtgggtaattcctcaggaaattggcattgcgattcccaatggctgggcgacagagtcatcaccaccagcacccgaacctgggccctgcccacctacaacaaccacctctacaagcaaatctccagccaatcaggagcatcgaacgacaaccactactttggctacagcaccccttgggggtattttgacttcaacagattccactgtcacttctccccacgtgactggcaaagactcatcaacaacaactggggattccgacccaagagactcagcttcaagctctttaacattcaagtcaaagaggtcacgcagaatgacggtacgacgacgattgccaataaccttaccagcacggttcaggtgtttactgactcggagtaccagctcccgtacgtcctcggctcggcgcatcaaggatgcctcccgccgtttccagcggacgtcttcatggtcccacagtatggatacctcaccctgaacaacgggagtcaggcggtaggacgctcttccttttactgcctggagtactttccttctcagatgctgcgtaccggaaacaactttaccttcagctacacctttgaggacgtgcctttccacagcagctacgctcacagccagagtttggaccggctgatgaatcctctgatcgaccagtatctgtattatctgaacaggacacaatcaaatagtggaactcttcagcagtctaggctactgtttagccaagctggacccaccagcatgtctcttcaagctaaaaactggctgcctggaccttgctacagacagcagcgtctgtcaaagcaggcaaacgacaacaacaacagcaactttccctggactgcggctacaaagtatcatctaaatggtcgggactcgttggttaatccaggaccagctatggccagccacaaagacgatgaagaaaagtttttccccatgcatggaaccctgatatttggtaaacaaggaacaaatgctaacgacgcggatttggaacatgtcatgattacagatgaagaagaaatcaggaccaccaatcccgtggctacagagcagtacggaaacgtgtcaaataatttgcaaaactcaaatactggtccaactacagaaaatgtcaatcaccagggagcgttacctggtatggtgtggcaggatcgagacgtgtacctgcagggacccatttgggccaagattcctcacaccgacggacactttcacccttctccactgatgggaggttttggactcaaacacccgcctcctcaaatcatgatcaaaaacactcctgttccagccaatcctcctacaaacttcagcgcggcaaagtttgcttccttcatcacacagtattccacgggacaggtcagcgtggagatcgagtgggagctgcagaaggagaacagcaaacgctggaaccccgagatccagtacacttccaactacaacaaatctgttaatgtggactttactgtggacactaatggtgtgtattcagagcctcgccccattggcaccagatacctgactcgtaatctgtaa

SEQ ID NO: 4439 - DNA, 2208 bp, Artificial Sequence
  Description of Artificial Sequence: Synthetic polynucleotide
atggctgccgatggttatcttccagattggctcgaggacactctctctgaaggaataagacagtggtggaagctcaaacctggcccaccaccaccaaagcccgcagagcggcatcaggacgacagcaggggtcttgtgcttcctgggtacaagtacctcggacccttcaacggactcgacaaaggagagccggtcaacgaggcagacgctgcggccctcgagcacgacaaggcctacgaccggcagctcgacagcggagacaacccgtacctcaagtacaaccacgccgacgcggagtttcaggagcgtcttaaagaagatacgtcttttgggggcaacctcggacgagcagtcttccaggcgaaaaagagggttcttgaacctctgggcctggttgaggaacctgttaagacggctccgggaaaaaagaggccggtagagcactctcctgcggagccagactcctcctcgggaaccggaaaagcgggccagcagcctgcaagaaagagattgaatttcggtcagactggagacgcagactccgtacctgacccccagcctctcggacagccaccagcagcccccacaagtttgggatctactacaatggctacaggcagtggcgcaccaatggcagacaataacgagggtgccgatggagtgggtaattcctcaggaaattggcattgcgattcccaatggctgggcgacagagtcatcaccaccagcacccgaacctgggccctgcccacctacaacaaccacctctacaagcaaatctccagccaatcaggagcatcgaacgacaaccactactttggctacagcaccccttgggggtattttgacttcaacagattccactgtcacttctccccacgtgactggcaaagactcatcaacaacaactggggattccgacccaagagactcaacttcaagctctttaacattcaagtcaaagaggtcacgcagaatgacggtacgacgacgattgccaataaccttaccagcacggttcaggtgtttactgactcggagtaccagctcccgtacgtcctcggctcggcgcatcaaggatgcctcccgccgtttccagcggacgtcttcatggtcccacagtatggatacctcaccctgaacaacgggagtcaggcggtaggacgctcttccttttactgcctggagtactttccttctcagatgctgcgtaccggaaacaactttaccttcagctacacctttgaggacgtgcctttccacagcagctacgctcacagccagagtttggaccggctgatgaatcctctgatcgaccagtatctgtattatctgaacaggacacaatcaaatagtggaactcttcagcagtctaggctactgtttagccaagctggacccaccagcatgtctcttcaagctaaaaactggctgcctggaccttgctacagacagcagcgtctgtcaaagcaggcaaacgacaacaacaacagcaactttccctggactgcggctacaaagtatcatctaaatggtcgggactcgttggttaatccaggaccagctatggccagccacaaagacgatgaagaaaagtttttccccatgcatggaaccctgatatttggtaaacaaggaacaaatgctaacgacgcggatttggaacatgtcatgattacagatgaagaagaaatcaggaccaccaatcccgtggctacagggcagtacggaaacgtgtcaaataatttgcaaaactcaaatactggtccaactacagaaaatgtcaatcaccagggagcgttacctggtatggtgtggcaggatcgagacgtgtacctgcagggacccatttgggccaagattcctcacaccgacggacactttcacccttctccactgatgggaggttttggactcaaacacccgcctcctcaaatcatgatcaaaaacactcctgttccagccaatcctcctacaaacttcagcgcggcaaagtttgcttccttcatcacacagtattccacgggacaggtcagcgtggagatcgagtgggagctgcagaaggagaacagcaaacgctggaaccccgagatccagtacacttccaactacaacaaatctgttaatgtggactttactgtggacactaatggtgtgtattcagagcctcgccccattggcaccagatacctgactcgtaatctgtaa

SEQ ID NO: 4440 - DNA, 2208 bp, Artificial Sequence
  Description of Artificial Sequence: Synthetic polynucleotide
atggctgccgatggttatcttccagattggctcgaggacactctctctgaaggaataagacagtggtggaagctcaaacctggcccaccaccaccaaagcccgcagagcggcatcaggacgacagcaggggtcttgtgcttcctgggtacaagtacctcggacccttcaacggactcgacaaaggagagccggtcaacgaggcagacgctgcggccctcgagcacgacaaggcctacgaccggcagctcgacagcggagacaacccgtacctcaagtacaaccacgccgacgcggagtttcaggagcgtcttaaagaagatacgtcttttgggggcaacctcggacgagcagtcttccaggcgaaaaagagggttcttgaacctctgggcctggttgaggaacctgttaagacggctccgggaaaaaagaggccggtagagcactctcctgcggagccagactcctcctcgggaaccggaaaagcgggccagcagcctgcaagaaagagattgaatttcggtcagactggagacgcagactccgtacctgacccccagcctctcggacagccaccagcagcccccacaagtttgggatctactacaatggctacaggcagtggcgcaccaatggcagacaataacgagggtgccgatggagtgggtaattcctcaggaaattggcattgcgattcccaatggctgggcgacagagtcatcaccaccagcacccgaacctgggccctgcccacctacaacaaccacctctacaagcaaatctccagccaatcaggagcatcgaacgacaaccactactttggctacagcaccccttgggggtattttgacttcaacagattccactgtcacttctccccacgtgactggcaaagactcatcaacaacaactggggattccgacccaagagactcaacttcaagctctttaacattcaagtcaaagaggtcacgcagaatgacggtacgacgacgattgccaataaccttaccagcacggttcaggtgtttactgactcggagtaccagctcccgtacgtcctcggctcggcgcatcaaggatgcctcccgccgtttccagcggacgtcttcatggtcccacagtatggatacctcaccctgaacaacgggagtcaggcggtaggacgctcttccttttactgcctggagtactttccttctcagatgctgcgtaccggaaacaactttaccttcagctacacctttgaggacgtgcctttccacagcagctacgctcacagccagagtttggaccggctgatgaatcctctgatcgaccagtatctgtattatctgaacaggacacaatcaaatagtggaactcttcagcagtctaggctactgtttagccaagctggacccaccagcatgtctcttcaagctaaaaactggctgcctggaccttgctacagacagcagcgtctgtcaaagcaggcaaacgacaacaacaacagcaactttccctggactgcggctacaaagtatcatctaaatggtcgggactcgttggttaatccaggaccagctatggccagccacaaagacgatgaagaaaagtttttccccatgcatggaaccctgatatttggtaaacaaggaacaaatgctaacgacgcggatttggaacatgtcatgattacagatgaagaagaaatcaggaccaccaatcccgtggctacagagcagtacggaaacgtgccaaataatttgcaaaactcaaatactggtccaactacagaaaatgtcaatcaccagggagcgttacctggtatggtgtggcaggatcgagacgtgtacctgcagggacccatttgggccaagattcctcacaccgacggacactttcacccttctccactgatgggaggttttggactcaaacacccgcctcctcaaatcatgatcaaaaacactcctgttccagccaatcctcctacaaacttcagcgcggcaaagtttgcttccttcatcacacagtattccacgggacaggtcagcgtggagatcgagtgggagctgcagaaggagaacagcaaacgctggaaccccgagatccagtacacttccaactacaacaaatctgttaatgtggactttactgtggacactaatggtgtgtattcagagcctcgccccattggcaccagatacctgactcgtaatctgtaa

SEQ ID NO: 4441 - DNA, 2208 bp, Artificial Sequence
  Description of Artificial Sequence: Synthetic polynucleotide
atggctgccgatggttatcttccagattggctcgaggacactctctctgaaggaataagacagtggtggaagctcaaacctggcccaccaccaccaaagcccgcagagcggcatcaggacgacagcaggggtcttgtgcttcctgggtacaagtacctcggacccttcaacggactcgacaaaggagagccggtcaacgaggcagacgctgcggccctcgagcacgacaaggcctacgaccggcagctcgacagcggagacaacccgtacctcaagtacaaccacgccgacgcggagtttcaggagcgtcttaaagaagatacgtcttttgggggcaacctcggacgagcagtcttccaggcgaaaaagagggttcttgaacctctgggcctggttgaggaacctgttaagacggctccgggaaaaaagaggccggtagagcactctcctgcggagccagactcctcctcgggaaccggaaaagcgggccagcagcctgcaagaaagagattgaatttcggtcagactggagacgcagactccgtacctgacccccagcctctcggacagccaccagcagcccccacaagtttgggatctactacaatggctacaggcagtggcgcaccaatggcagacaataacgagggtgccgatggagtgggtaattcctcaggaaattggcattgcgattcccaatggctgggcgacagagtcatcaccaccagcacccgaacctgggccctgcccacctacaacaaccacctctacaagcaaatctccagccaatcaggagcatcgaacgacaaccactactttggctacagcaccccttgggggtattttgacttcaacagattccactgtcacttctccccacgtgactggcaaagactcatcaacaacaactggggattccgacccaagagactcaacttcaagctctttaacattcaagtcaaagaggtcacgcagaatgacggtacgacgacgattgccaataaccttaccagcacggttcaggtgtttactgactcggagtaccagctcccgtacgtcctcggctcggcgcatcaaggatgcctcccgccgtttccagcggacgtcttcatggtcccacagtatggatacctcaccccgaacaacgggagtcaggcggtaggacgctcttccttttactgcctggagtactttccttctcagatgctgcgtaccggaaacaactttaccttcagctacacctttgaggacgtgcctttccacagcagctacgctcacagccagagtttggaccggctgatgaatcctctgatcgaccagtatctgtattatctgaacaggacacaatcaaatagtggaactcttcagcagtctaggctactgtttagccaagctggacccaccagcatgtctcttcaagctaaaaactggctgcctggaccttgctacagacagcagcgtctgtcaaagcaggcaaacgacaacaacaacagcaactttccctggactgcggctacaaagtatcatctaaatggtcgggactcgttggttaatccaggaccagctatggccagccacaaagacgatgaagaaaagtttttccccatgcatggaaccctgatatttggtaaacaaggaacaaatgctaacgacgcggatttggaacatgtcatgattacagatgaagaagaaatcaggaccaccaatcccgtggctacagagcagtacggaaacgtgtcaaataatttgcaaaactcaaatactggtccaactacagaaaatgtcaatcaccagggagcgttacctggtatggtgtggcaggatcgagacgtgtacctgcagggacccatttgggccaagattcctcacaccgacggacactttcacccttctccactgatgggaggttttggactcaaacacccgcctcctcaaatcatgatcaaaaacactcctgttccagccaatcctcctacaaacttcagcgcggcaaagtttgcttccttcatcacacagtattccacgggacaggtcagcgtggagatcgagtgggagctgcagaaggagaacagcaaacgctggaaccccgagatccagtacacttccaactacaacaaatctgttaatgtggactttactgtggacactaatggtgtgtattcagagcctcgccccattggcaccagatacctgactcgtaatctgtaa

SEQ ID NO: 4442 - DNA, 2208 bp, Artificial Sequence
  Description of Artificial Sequence: Synthetic polynucleotide
atggctgccgatggttatcttccagattggctcgaggacactctctctgaaggaataagacagtggtggaagctcaaacctggcccaccaccaccaaagcccgcagagcggcatcaggacgacagcaggggtcttgtgcttcctgggtacaagtacctcggacccttcaacggactcgacaaaggagagccggtcaacgaggcagacgctgcggccctcgagcacgacaaggcctacgaccggcagctcgacagcggagacaacccgtacctcaagtacaaccacgccgacgcggagtttcaggagcgtcttaaagaagatacgtcttttgggggcaacctcggacgagcagccttccaggcgaaaaagagggttcttgaacctctgggcctggttgaggaacctgttaagacggctccgggaaaaaagaggccggtagagcactctcctgcggagccagactcctcctcgggaaccggaaaagcgggccagcagcctgcaagaaagagattgaatttcggtcagactggagacgcagactccgtacctgacccccagcctctcggacagccaccagcagcccccacaagtttgggatctactacaatggctacaggcagtggcgcaccaatggcagacaataacgagggtgccgatggagtgggtaattcctcaggaaattggcattgcgattcccaatggctgggcgacagagtcatcaccaccagcacccgaacctgggccctgcccacctacaacaaccacctctacaagcaaatctccagccaatcaggagcatcgaacgacaaccactactttggctacagcaccccttgggggtattttgacttcaacagattccactgtcacttctccccacgtgactggcaaagactcatcaacaacaactggggattccgacccaagagactcaacttcaagctctttaacattcaagtcaaagaggtcacgcagaatgacggtacgacgacgattgccaataaccttaccagcacggttcaggtgtttactgactcggagtaccagctcccgtacgtcctcggctcggcgcatcaaggatgcctcccgccgtttccagcggacgtcttcatggtcccacagtatggatacctcaccctgaacaacgggagtcaggcggtaggacgctcttccttttactgcctggagtactttccttctcagatgctgcgtaccggaaacaactttaccttcagctacacctttgaggacgtgcctttccacagcagctacgctcacagccagagtttggaccggctgatgaatcctctgatcgaccagtatctgtattatctgaacaggacacaatcaaatagtggaactcttcagcagtctaggctactgtttagccaagctggacccaccagcatgtctcttcaagctaaaaactggctgcctggaccttgctacagacagcagcgtctgtcaaagcaggcaaacgacaacaacaacagcaactttccctggactgcggctacaaagtatcatctaaatggtcgggactcgttggttaatccaggaccagctatggccagccacaaagacgatgaagaaaagtttttccccatgcatggaaccctgatatttggtaaacaaggaacaaatgctaacgacgcggatttggaacatgtcatgattacagatgaagaagaaatcaggaccaccaatcccgtggctacagagcagtacggaaacgtgtcaaataatttgcaaaactcaaatactggtccaactacagaaaatgtcaatcaccagggagcgttacctggtatggtgtggcaggatcgagacgtgtacctgcagggacccatttgggccaagattcctcacaccgacggacactttcacccttctccactgatgggaggttttggactcaaacacccgcctcctcaaatcatgatcaaaaacactcctgttccagccaatcctcctacaaacttcagcgcggcaaagtttgcttccttcatcacacagtattccacgggacaggtcagcgtggagatcgagtgggagctgcagaaggagaacagcaaacgctggaaccccgagatccagtacacttccaactacaacaaatctgttaatgtggactttactgtggacactaatggtgtgtattcagagcctcgccccattggcaccagatacctgactcgtaatctgtaa

SEQ ID NO: 4443 - DNA, 2208 bp, Artificial Sequence
  Description of Artificial Sequence: Synthetic polynucleotide
atggctgccgatggttatcttccagattggctcgaggacactctctctgaaggaataagacagtggtggaagctcaaacctggcccaccaccaccaaagcccgcagagcggcatcaggacgacagcaggggtcttgtgcttcctgggtacaagtacctcggacccttcaacggactcgacaaaggagagccggtcaacgaggcagacgctgcggccctcgagcacgacaaggcctacgaccggcagctcgacagcggagacaacccgtacctcaagtacaaccacgccgacgcggagtttcaggagcgtcttaaagaagatacgtcttttgggggcaacctcggacgagcagtcttccaggcgaaaaagagggttcttgaacctctgggcctggttgaggaacctgttaagacggctccgggaaaaaagaggccggtagagcactctcctgcggagccagactcctcctcgggaaccggaaaagcgggccagcagcctgcaagaaagagattgaatttcggtcagactggagacgcagactccgtacctgacccccagcctctcggacagccaccagcagcccccacaagtttgggatctactacaatggctacaggcagtggcgcaccaatggcagacaataacgagggtgccgatggagtgggtaattcctcaggaaattggcattgcgattcccaatggctgggcgacagagtcatcaccaccagcacccgaacctgggccctgcccacctacaacaaccacctctacaagcaaatctccagccaatcaggagcatcgaacgacaaccactactttggctacagcaccccttgggggtattttgacttcaacagattccactgtcacttctccccacgtgactggcaaagactcatcaacaacaactggggattccgacccaagagactcaacttcaagctctttaacattcaagtcaaagaggtcacgcagaatgacggtacgacgacgattgccaataaccttaccagcacggttcaggtgtttactgactcggagtaccagctcccgtacgtcctcggctcggcgcatcaaggatgcctcccgccgtttccagcggacgtcttcatggtcccacagtatggatacctcaccctgaacaacgggagtcaggcggtaggacgctcttccttttactgcctggagtactttcctcctcagatgctgcgtaccggaaacaactttaccttcagctacacctttgaggacgtgcctttccacagcagctacgctcacagccagagtttggaccggctgatgaatcctctgatcgaccagtatctgtattatctgaacaggacacaatcaaatagtggaactcttcagcagtctaggctactgtttagccaagctggacccaccagcatgtctcttcaagctaaaaactggctgcctggaccttgctacagacagcagcgtctgtcaaagcaggcaaacgacaacaacaacagcaactttccctggactgcggctacaaagtatcatctaaatggtcgggactcgttggttaatccaggaccagctatggccagccacaaagacgatgaagaaaagtttttccccatgcatggaaccctgatatttggtaaacaaggaacaaatgctaacgacgcggatttggaacatgtcatgattacagatgaagaagaaatcaggaccaccaatcccgtggctacagagcagtacggaaacgtgtcaaataatttgcaaaactcaaatactggtccaactacagaaaatgtcaatcaccagggagcgttacctggtatggtgtggcaggatcgagacgtgtacctgcagggacccatttgggccaagattcctcacaccgacggacactttcacccttctccactgatgggaggttttggactcaaacacccgcctcctcaaatcatgatcaaaaacactcctgttccagccaatcctcctacaaacttcagcgcggcaaagtttgcttccttcatcacacagtattccacgggacaggtcagcgtggagatcgagtgggagctgcagaaggagaacagcaaacgctggaaccccgagatccagtacacttccaactacaacaaatctgttaatgtggactttactgtggacactaatggtgtgtattcagagcctcgccccattggcaccagatacctgactcgtaatctgtaa

SEQ ID NO: 4444 - DNA, 2208 bp, Artificial Sequence
  Description of Artificial Sequence: Synthetic polynucleotide
atggctgccgatggttatcttccagattggctcgaggacactctccctgaaggaataagacagtggtggaagctcaaacctggcccaccaccaccaaagcccgcagagcggcatcaggacgacagcaggggtcttgtgcttcctgggtacaagtacctcggacccttcaacggactcgacaaaggagagccggtcaacgaggcagacgctgcggccctcgagcacgacaaggcctacgaccggcagctcgacagcggagacaacccgtacctcaagtacaaccacgccgacgcggagtttcaggagcgtcttaaagaagatacgtcttttgggggcaacctcggacgagcagtcttccaggcgaaaaagagggttcttgaacctctgggcctggttgaggaacctgttaagacggctccgggaaaaaagaggccggtagagcactctcctgcggagccagactcctcctcgggaaccggaaaagcgggccagcagcctgcaagaaagagattgaatttcggtcagactggagacgcagactccgtacctgacccccagcctctcggacagccaccagcagcccccacaagtttgggatctactacaatggctacaggcagtggcgcaccaatggcagacaataacgagggtgccgatggagtgggtaattcctcaggaaattggcattgcgattcccaatggctgggcgacagagtcatcaccaccagcacccgaacctgggccctgcccacctacaacaaccacctctacaagcaaatctccagccaatcaggagcatcgaacgacaaccactactttggctacagcaccccttgggggtattttgacttcaacagattccactgtcacttctccccacgtgactggcaaagactcatcaacaacaactggggattccgacccaagagactcaacttcaagctctttaacattcaagtcaaagaggtcacgcagaatgacggtacgacgacgattgccaataaccttaccagcacggttcaggtgtttactgactcggagtaccagctcccgtacgtcctcggctcggcgcatcaaggatgcctcccgccgtttccagcggacgtcttcatggtcccacagtatggatacctcaccctgaacaacgggagtcaggcggtaggacgctcttccttttactgcctggagtactttccttctcagatgctgcgtaccggaaacaactttaccttcagctacacctttgaggacgtgcctttccacagcagctacgctcacagccagagtttggaccggctgatgaatcctctgatcgaccagtatctgtattatctgaacaggacacaatcaaatagtggaactcttcagcagtctaggctactgtttagccaagctggacccaccagcatgtctcttcaagctaaaaactggctgcctggaccttgctacagacagcagcgtctgtcaaagcaggcaaacgacaacaacaacagcaactttccctggactgcggctacaaagtatcatctaaatggtcgggactcgttggttaatccaggaccagctatggccagccacaaagacgatgaagaaaagtttttccccatgcatggaaccctgatatttggtaaacaaggaacaaatgctaacgacgcggatttggaacatgtcatgattacagatgaagaagaaatcaggaccaccaatcccgtggctacagagcagtacggaaacgtgtcaaataatttgcaaaactcaaatactggtccaactacagaaaatgtcaatcaccagggagcgttacctggtatggtgtggcaggatcgagacgtgtacctgcagggacccatttgggccaagattcctcacaccgacggacactttcacccttctccactgatgggaggttttggactcaaacacccgcctcctcaaatcatgatcaaaaacactcctgttccagccaatcctcctacaaacttcagcgcggcaaagtttgcttccttcatcacacagtattccacgggacaggtcagcgtggagatcgagtgggagctgcagaaggagaacagcaaacgctggaaccccgagatccagtacacttccaactacaacaaatctgttaatgtggactttactgtggacactaatggtgtgtattcagagcctcgccccattggcaccagatacctgactcgtaatctgtaa

SEQ ID NO: 4445 - DNA, 2208 bp, Artificial Sequence
  Description of Artificial Sequence: Synthetic polynucleotide
atggctgccgatggttatcttccagattggctcgaggacactctctctgaaggaataagacagtggtggaagctcaaacctggcccaccaccaccaaagcccgcagagcggcatcaggacgacagcaggggtcttgtgcttcctgggtacaagtacctcggacccttcaacggactcgacaaaggagagccggtcaacgaggcagacgctgcggccctcgagcacgacaaggcctacgaccggcagctcgacagcggagacaacccgtacctcaagtacaaccacgccgacgcggagtttcaggagcgtcttaaagaagatacgtcttttgggggcaacctcggacgagcagtcttccaggcgaaaaagagggttcttgaacctctgggcctggttgaggaacctgttaagacggctccgggaaaaaagaggccggtagagcactctcctgcggagccagactcctcctcgggaaccggaaaagcgggccagcagcctgcaagaaagagattgaatttcggtcagactggagacgcagactccgtacctgacccccagcctctcggacagccaccagcagcccccacaagtttgggatctactacaatggctacaggcagtggcgcaccaatggcagacaataacgagggtgccgatggagtgggtaattcctcaggaaattggcattgcgattcccaatggctgggcgacagagtcatcaccaccagcacccgaacctgggccctgcccacctacaacaaccacctctacaagcaaatctccagccaatcaggagcatcgaacgacaaccactactttggctacagcaccccttgggggtattttgacttcaacagattccactgtcacttctccccacgtgactggcaaagactcatcaacaacaactggggattccgacccaagagactcaacttcaagctctttaacattcaagtcaaagaggtcacgcagaatgacggtacgacgacgattgccaataaccttaccagcacggttcaggtgtttactgactcggagtaccagctcccgtacgtcctcggctcggcgcatcaaggatgcctcccgccgtttccagcggacgtcttcatggtcccacagtatggatacctcaccctgaacaacgggagtcaggcggtaggacgctcttccttttactgcctggagtactttccttctcagatgctgcgtaccggaaacaactttaccttcagctacacctttgaggacgtgcctttccacagcagctacgctcacagccagagtttggaccggctgatgaatcctctgatcgaccagtatctgtattatctgaacaggacacaatcaaatagtggaactcttcagcagtctaggctactgtttagccaagctggacccaccagcatgtctcttcaagctaaaaactggctgcctggaccttgctacagacggcagcgtctgtcaaagcaggcaaacgacaacaacaacagcaactttccctggactgcggctacaaagtatcatctaaatggtcgggactcgttggttaatccaggaccagctatggccagccacaaagacgatgaagaaaagtttttccccatgcatggaaccctgatatttggtaaacaaggaacaaatgctaacgacgcggatttggaacatgtcatgattacagatgaagaagaaatcaggaccaccaatcccgtggctacagagcagtacggaaacgtgtcaaataatttgcaaaactcaaatactggtccaactacagaaaatgtcaatcaccagggagcgttacctggtatggtgtggcaggatcgagacgtgtacctgcagggacccatttgggccaagattcctcacaccgacggacactttcacccttctccactgatgggaggttttggactcaaacacccgcctcctcaaatcatgatcaaaaacactcctgttccagccaatcctcctacaaacttcagcgcggcaaagtttgcttccttcatcacacagtattccacgggacaggtcagcgtggagatcgagtgggagctgcagaaggagaacagcaaacgctggaaccccgagatccagtacacttccaactacaacaaatctgttaatgtggactttactgtggacactaatggtgtgtattcagagcctcgccccattggcaccagatacctgactcgtaatctgtaa

SEQ ID NO: 4446 - DNA, 2208 bp, Artificial Sequence
  Description of Artificial Sequence: Synthetic polynucleotide
atggctgccgatggttatcttccagattggctcgaggacactctctctgaaggaataagacagtggtggaagctcaaacctggcccaccaccaccaaagcccgcagagcggcatcaggacgacagcaggggtcttgtgcttcctgggtacaagtacctcggacccttcaacggactcgacaaaggagagccggtcaacgaggcagacgctgcggccctcgagcacgacaaggcctacgaccggcagctcgacagcggagacaacccgtacctcaagtacaaccacgccgacgcggagtttcaggagcgtcttaaagaagatacgtcttttgggggcaacctcggacgagcagtcttccaggcgaaaaagagggttcttgaacctctgggcctggttgaggaacctgttaagacggctccgggaaaaaagaggccggtagagcactctcctgcggagccagactcctcctcgggaaccggaaaagcgggccagcagcctgcaagaaagagattgaatttcggtcagactggagacgcagactccgtacctgacccccagcctctcggacagccaccagcagcccccacaagtttgggatctactacaatggctacaggcagtggcgcaccaatggcagacaataacgagggtgccgatggagtgggtaattcctcaggaaattggcattgcgattcccaatggctgggcgacagagtcatcaccaccagcacccgaacctgggccctgcccacctacaacaaccacctctacaagcaaatctccagccaatcaggagcatcgaacgacaaccactactttggctacagcaccccttgggggtattttgacttcaacagattccactgtcacttctccccacgtgactggcaaagactcatcaacaacaactggggattccgacccaagagactcaacttcaagctctttaacattcaagtcaaagaggtcacgcagaatgacggtacgacgacgattgccaataaccttaccagcacggttcaggtgtttactgactcggagtaccagctcccgtacgtcctcggctcggcgcatcaaggatgcctcccgccgtttccagcggacgtcttcatggtcccacagtatggatacctcaccctgaacaacgggagtcaggcggtaggacgctcttccttttactgcctggagtaccttccttctcagatgctgcgtaccggaaacaactttaccttcagctacacctttgaggacgtgcctttccacagcagctacgctcacagccagagtttggaccggctgatgaatcctctgatcgaccagtatctgtattatctgaacaggacacaatcaaatagtggaactcttcagcagtctaggctactgtttagccaagctggacccaccagcatgtctcttcaagctaaaaactggctgcctggaccttgctacagacagcagcgtctgtcaaagcaggcaaacgacaacaacaacagcaactttccctggactgcggctacaaagtatcatctaaatggtcgggactcgttggttaatccaggaccagctatggccagccacaaagacgatgaagaaaagtttttccccatgcatggaaccctgatatttggtaaacaaggaacaaatgctaacgacgcggatttggaacatgtcatgattacagatgaagaagaaatcaggaccaccaatcccgtggctacagagcagtacggaaacgtgtcaaataatttgcaaaactcaaatactggtccaactacagaaaatgtcaatcaccagggagcgttacctggtatggtgtggcaggatcgagacgtgtacctgcagggacccatttgggccaagattcctcacaccgacggacactttcacccttctccactgatgggaggttttggactcaaacacccgcctcctcaaatcatgatcaaaaacactcctgttccagccaatcctcctacaaacttcagcgcggcaaagtttgcttccttcatcacacagtattccacgggacaggtcagcgtggagatcgagtgggagctgcagaaggagaacagcaaacgctggaaccccgagatccagtacacttccaactacaacaaatctgttaatgtggactttactgtggacactaatggtgtgtattcagagcctcgccccattggcaccagatacctgactcgtaatctgtaa

SEQ ID NO: 4447 - DNA, 2208 bp, Artificial Sequence
  Description of Artificial Sequence: Synthetic polynucleotide
atggctgccgatggttatcttccagattggctcgaggacactctctctgaaggaataagacagtggtggaagctcaaacctggcccaccaccaccaaagcccgcagagcggcatcaggacgacagcaggggtcttgtgcttcctgggtacaagtacctcggacccttcaacggactcgacaaaggagagccggtcaacgaggcagacgctgcggccctcgagcacgacaaggcctacgaccggcagctcgacagcggagacaacccgtacctcaagtacaaccacgccgacgcggagtttcaggagcgtcttaaagaagatacgtcttttgggggcaacctcggacgagcagtcttccaggcgaaaaagagggttcttgaacctctgggcctggttgaggaacctgttaagacggctccgggaaaaaagaggccggtagagcactctcctgcggagccagactcctcctcgggaaccggaaaagcgggccagcagcctgcaagaaagagattgaatttcggtcagactggagacgcagactccgtacctgacccccagcctctcggacagccaccagcagcccccacaagtttgggatctactacaatggctacaggcagtggcgcaccaatggcagacaataacgagggtgccgatggagtgggtaattcctcaggaaattggcattgcgattcccaatggctgggcgacagagtcatcaccaccagcacccgaacctgggccctgcccacctacaacaaccacctctacaagcaaatctccagccaatcaggagcatcgaacgacaaccactactttggctacagcaccccttgggggtattttgacttcaacagattccactgtcacttctccccacgtgactggcaaagactcatcaacaacaactggggattccgacccaagagactcaacttcaagctctttaacattcaagtcaaagaggtcacgcagaatgacggtacgacgacgattgccaataaccttaccagcacggttcaggtgtttactgactcggagtaccagctcccgtacgtcctcggctcggcgcatcaaggatgcctcccgccgtttccagcggacgtcttcatggtcccacagtatggatacctcaccctgaacaacgggagtcaggcggtaggacgctcttccttttactgcctggagtactttccttctcagatgctgcgtaccggaaacaactttaccttcagctacacctttgaggacgtgcctttccacagcagctacgctcacagccagagtttggaccggctgatgaatcctctgatcgaccagtatctgtattatctgaacaggacacaatcaaatagtggaactcttcagcagtctaggctactgtttagccaagctggacccaccagcatgtctcttcaagctaaaaactggctgcctggaccttgctacagacagcagcgtctgtcaaagcaggcaaacgacaacaacaacggcaactttccctggactgcggctacaaagtatcatctaaatggtcgggactcgttggttaatccaggaccagctatggccagccacaaagacgatgaagaaaagtttttccccatgcatggaaccctgatatttggtaaacaaggaacaaatgctaacgacgcggatttggaacatgtcatgattacagatgaagaagaaatcaggaccaccaatcccgtggctacagagcagtacggaaacgtgtcaaataatttgcaaaactcaaatactggtccaactacagaaaatgtcaatcaccagggagcgttacctggtatggtgtggcaggatcgagacgtgtacctgcagggacccatttgggccaagattcctcacaccgacggacactttcacccttctccactgatgggaggttttggactcaaacacccgcctcctcaaatcatgatcaaaaacactcctgttccagccaatcctcctacaaacttcagcgcggcaaagtttgcttccttcatcacacagtattccacgggacaggtcagcgtggagatcgagtgggagctgcagaaggagaacagcaaacgctggaaccccgagatccagtacacttccaactacaacaaatctgttaatgtggactttactgtggacactaatggtgtgtattcagagcctcgccccattggcaccagatacctgactcgtaatctgtaa

SEQ ID NO: 4448 - DNA, 2208 bp, Artificial Sequence
  Description of Artificial Sequence: Synthetic polynucleotide
atggctgccgatggttatcttccagattggctcgaggacactctctctgaaggaataagacagtggtggaagctcaaacctggcccaccaccaccaaagcccgcagagcggcatcaggacgacagcaggggtcttgtgcttcctgggtacaagtacctcggacccttcaacggactcgacaaaggagagccggtcaacgaggcagacgctgcggccctcgagcacgacaaggcctacgaccggcagttcgacagcggagacaacccgtacctcaagtacaaccacgccgacgcggagtttcaggagcgtcttaaagaagatacgtcttttgggggcaacctcggacgagcagtcttccaggcgaaaaagagggttcttgaacctctgggcctggttgaggaacctgttaagacggctccgggaaaaaagaggccggtagagcactctcctgcggagccagactcctcctcgggaaccggaaaagcgggccagcagcctgcaagaaagagattgaatttcggtcagactggagacgcagactccgtacctgacccccagcctctcggacagccaccagcagcccccacaagtttgggatctactacaatggctacaggcagtggcgcaccaatggcagacaataacgagggtgccgatggagtgggtaattcctcaggaaattggcattgcgattcccaatggctgggcgacagagtcatcaccaccagcacccgaacctgggccctgcccacctacaacaaccacctctacaagcaaatctccagccaatcaggagcatcgaacgacaaccactactttggctacagcaccccttgggggtattttgacttcaacagattccactgtcacttctccccacgtgactggcaaagactcatcaacaacaactggggattccgacccaagagactcaacttcaagctctttaacattcaagtcaaagaggtcacgcagaatgacggtacgacgacgattgccaataaccttaccagcacggttcaggtgtttactgactcggagtaccagctcccgtacgtcctcggctcggcgcatcaaggatgcctcccgccgtttccagcggacgtcttcatggtcccacagtatggatacctcaccctgaacaacgggagtcaggcggtaggacgctcttccttttactgcctggagtactttccttctcagatgctgcgtaccggaaacaactttaccttcagctacacctttgaggacgtgcctttccacagcagctacgctcacagccagagtttggaccggctgatgaatcctctgatcgaccagtatctgtattatctgaacaggacacaatcaaatagtggaactcttcagcagtctaggctactgtttagccaagctggacccaccagcatgtctcttcaagctaaaaactggctgcctggaccttgctacagacagcagcgtctgtcaaagcaggcaaacgacaacaacaacagcaactttccctggactgcggctacaaagtatcatctaaatggtcgggactcgttggttaatccaggaccagctatggccagccacaaagacgatgaagaaaagtttttccccatgcatggaaccctgatatttggtaaacaaggaacaaatgctaacgacgcggatttggaacatgtcatgattacagatgaagaagaaatcaggaccaccaatcccgtggctacagagcagtacggaaacgtgtcaaataatttgcaaaactcaaatactggtccaactacagaaaatgtcaatcaccagggagcgttacctggtatggtgtggcaggatcgagacgtgtacctgcagggacccatttgggccaagattcctcacaccgacggacactttcacccttctccactgatgggaggttttggactcaaacacccgcctcctcaaatcatgatcaaaaacactcctgttccagccaatcctcctacaaacttcagcgcggcaaagtttgcttccttcatcacacagtattccacgggacaggtcagcgtggagatcgagtgggagctgcagaaggagaacagcaaacgctggaaccccgagatccagtacacttccaactacaacaaatctgttaatgtggactttactgtggacactaatggtgtgtattcagagcctcgccccattggcaccagatacctgactcgtaatctgtaa

SEQ ID NO: 4449 - DNA, 2208 bp, Artificial Sequence
  Description of Artificial Sequence: Synthetic polynucleotide
atggctgccgatggttatcttccagattggctcgaggacactctctctgaaggaataagacagtggtggaagctcaaacctggcccaccaccaccaaagcccgcagagcggcatcaggacgacagcaggggtcttgtgcttcctgggtacaagtacctcggacccttcaacggactcgacaaaggagagccggtcaacgaggcagacgctgcggccctcgagcacgacaaggcctacgaccggcagctcgacagcggagacaacccgtacctcaagtacaaccacgccgacgcggagtttcaggagcgtcttaaagaagatacgtcttttgggggcaacctcggacgagcagtcttccaggcgaaaaagagggttcttgaacctctgggcctggttgaggaacctgttaagacggctccgggaaaaaagaggccggtagagcactctcctgcggagccagactcctcctcgggaaccggaaaagcgggccagcagcctgcaagaaagagattgaatttcggtcagactggagacgcagactccgtacctgacccccagcctctcggacagccaccagcagcccccacaagtttgggatctactacaatggctacaggcagtggcgcaccaatggcagacaataacgagggtgccgatggagtgggtaattcctcaggaaattggcattgcgattcccaatggctgggcgacagagtcatcaccaccagcacccgaacctgggccctgcccacctacaacaaccacctctacaagcaaatctccagccaatcaggagcatcgaacgacaaccactactttggctacagcaccccttgggggtattttgacttcaacagattccactgtcacttctccccacgtgaccggcaaagactcatcaacaacaactggggattccgacccaagagactcaacttcaagctctttaacattcaagtcaaagaggtcacgcagaatgacggtacgacgacgattgccaataaccttaccagcacggttcaggtgtttactgactcggagtaccagctcccgtacgtcctcggctcggcgcatcaaggatgcctcccgccgtttccagcggacgtcttcatggtcccacagtatggatacctcaccctgaacaacgggagtcaggcggtaggacgctcttccttttactgcctggagtactttccttctcagatgctgcgtaccggaaacaactttaccttcagctacacctttgaggacgtgcctttccacagcagctacgctcacagccagagtttggaccggctgatgaatcctctgatcgaccagtatctgtattatctgaacaggacacaatcaaatagtggaactcttcagcagtctaggctactgtttagccaagctggacccaccagcatgtctcttcaagctaaaaactggctgcctggaccttgctacagacagcagcgtctgtcaaagcaggcaaacgacaacaacaacagcaactttccctggactgcggctacaaagtatcatctaaatggtcgggactcgttggttaatccaggaccagctatggccagccacaaagacgatgaagaaaagtttttccccatgcatggaaccctgatatttggtaaacaaggaacaaatgctaacgacgcggatttggaacatgtcatgattacagatgaagaagaaatcaggaccaccaatcccgtggctacagagcagtacggaaacgtgtcaaataatttgcaaaactcaaatactggtccaactacagaaaatgtcaatcaccagggagcgttacctggtatggtgtggcaggatcgagacgtgtacctgcagggacccatttgggccaagattcctcacaccgacggacactttcacccttctccactgatgggaggttttggactcaaacacccgcctcctcaaatcatgatcaaaaacactcctgttccagccaatcctcctacaaacttcagcgcggcaaagtttgcttccttcatcacacagtattccacgggacaggtcagcgtggagatcgagtgggagctgcagaaggagaacagcaaacgctggaaccccgagatccagtacacttccaactacaacaaatctgttaatgtggactttactgtggacactaatggtgtgtattcagagcctcgccccattggcaccagatacctgactcgtaatctgtaa

SEQ ID NO: 4450 - DNA, 2208 bp, Artificial Sequence
  Description of Artificial Sequence: Synthetic polynucleotide
atggctgccgatggttatcttccagattggctcgaggacactctctctgaaggaataagacagtggtggaagctcaaacctggcccaccaccaccaaagcccgcagagcggcatcaggacgacagcaggggtcttgtgcttcctgggtacaagtacctcggacccttcaacggactcgacaaaggagagccggtcaacgaggcagacgctgcggccctcgagcacgacaaggcctacgaccggcagctcgacagcggagacaacccgtacctcaagtacaaccacgccgacgcggagtttcaggagcgtcttaaagaagatacgtcttttgggggcaacctcggacgagcagtcttccaggcgaaaaagagggttcttgaacctctgggcctggttgaggaacctgttaagacggctccgggaaaaaagaggccggtagagcactctcctgcggagccagactcctcctcgggaaccggaaaagcgggccagcagcctgcaagaaagagattgaatttcggtcagactggagacgcagactccgtacctgacccccagcctctcggacagccaccagcagcccccacaagtttgggatctactacaatggctacaggcagtggcgcaccaatggcagacaataacgagggtgccgatggagtgggtaattcctcaggaaattggcattgcgattcccaatggctgggcgacagagtcatcaccaccagcacccgaacctgggccctgcccgcctacaacaaccacctctacaagcaaatctccagccaatcaggagcatcgaacgacaaccactactttggctacagcaccccttgggggtattttgacttcaacagattccactgtcacttctccccacgtgactggcaaagactcatcaacaacaactggggattccgacccaagagactcaacttcaagctctttaacattcaagtcaaagaggtcacgcagaatgacggtacgacgacgattgccaataaccttaccagcacggttcaggtgtttactgactcggagtaccagctcccgtacgtcctcggctcggcgcatcaaggatgcctcccgccgtttccagcggacgtcttcatggtcccacagtatggatacctcaccctgaacaacgggagtcaggcggtaggacgctcttccttttactgcctggagtactttccttctcagatgctgcgtaccggaaacaactttaccttcagctacacctttgaggacgtgcctttccacagcagctacgctcacagccagagtttggaccggctgatgaatcctctgatcgaccagtatctgtattatctgaacaggacacaatcaaatagtggaactcttcagcagtctaggctactgtttagccaagctggacccaccagcatgtctcttcaagctaaaaactggctgcctggaccttgctacagacagcagcgtctgtcaaagcaggcaaacgacaacaacaacagcaactttccctggactgcggctacaaagtatcatctaaatggtcgggactcgttggttaatccaggaccagctatggccagccacaaagacgatgaagaaaagtttttccccatgcatggaaccctgatatttggtaaacaaggaacaaatgctaacgacgcggatttggaacatgtcatgattacagatgaagaagaaatcaggaccaccaatcccgtggctacagagcagtacggaaacgtgtcaaataatttgcaaaactcaaatactggtccaactacagaaaatgtcaatcaccagggagcgttacctggtatggtgtggcaggatcgagacgtgtacctgcagggacccatttgggccaagattcctcacaccgacggacactttcacccttctccactgatgggaggttttggactcaaacacccgcctcctcaaatcatgatcaaaaacactcctgttccagccaatcctcctacaaacttcagcgcggcaaagtttgcttccttcatcacacagtattccacgggacaggtcagcgtggagatcgagtgggagctgcagaaggagaacagcaaacgctggaaccccgagatccagtacacttccaactacaacaaatctgttaatgtggactttactgtggacactaatggtgtgtattcagagcctcgccccattggcaccagatacctgactcgtaatctgtaa

SEQ ID NO: 4451 - DNA, 2205 bp, Artificial Sequence
  Description of Artificial Sequence: Synthetic polynucleotide
atggctgccgatggttatcttccagattggctcgaggacactctctctgaaggaataagacagtggtggaagctcaaacctggcccaccaccaccaaagcccgcagagcggcatcaggacgacagcaggggtcttgtgcttcctgggtacaagtacctcggacccttcaacggactcgacaaaggagagccggtcaacgaggcagacgctgcggccctcgagcacgacaaggcctacgaccggcagctcgacagcggagacaacccgtacctcaagtacaaccacgccgacgcggagtttcaggagcgtcttaaagaagatacgtcttttgggggcaacctcggacgagcagtcttccaggcgaaaaagagggttcttgaacctctgggcctggttgaggaacctgttaagacggctccgggaaaaaagaggccggtagagcactctcctgcggagccagactcctcctcgggaaccggaaaagcgggccagcagcctgcaagaaagagattgaatttcggtcagactggagacgcagactccgtacctgacccccagcctctcggacagccaccagcagcccccacaagtttgggatctactacaatggctacaggcagtggcgcaccaatggcagacaataacgagggtgccgatggagtgggtaattcctcaggaaattggcattgcgattcccaatggctgggcgacagagtcatcaccaccagcacccgaacctgggccctgcccacctacaacaaccacctctacaagcaaatctccagccaatcaggagcatcgaacgacaaccactactttggctacagcaccccttgggggtattttgacttcaacagattccactgtcacttctccccacgtgactggcaaagactcatcaacaacaactggggattccgacccaagagactcaacttcaagctctttaacattcaagtcaaagaggtcacgcagaatgacggtacgacgacgattgccaataaccttaccagcacggttcaggtgtttactgactcggagtaccagctcccgtacgtcctcggctcggcgcatcaaggatgcctcccgccgtttccagcggacgccttcatggtcccacagtatggatacctcaccctgaacaacgggagtcaggcggtaggacgctcttccttttactgcctggagtactttccttctcagatgctgcgtaccggaaacaactttaccttcagctacacctttgaggacgtgcctttccacagcagctacgctcacagccagagtttggaccggctgatgaatcctctgatcgaccagtatctgtattatctgaacaggacacaatcaaatagtggaactcttcagcagtctaggctactgtttagccaagctggacccaccagcatgtctcttcaagctaaaaactggctgcctggaccttgctacagacagcagcgtctgtcaaagcaggcaaacgacaacaacagcaactttccctggactgcggctacaaagtatcatctaaatggtcgggactcgttggttaatccaggaccagctatggccagccacaaagacgatgaagaaaagtttttccccatgcatggaaccctgatatttggtaaacaaggaacaaatgctaacgacgcggatttggaacatgtcatgattacagatgaagaagaaatcaggaccaccaatcccgtggctacagagcagtacggaaacgtgtcaaataatttgcaaaactcaaatactggtccaactacagaaaatgtcaatcaccagggagcgttacctggtatggtgtggcaggatcgagacgtgtacctgcagggacccatttgggccaagattcctcacaccgacggacactttcacccttctccactgatgggaggttttggactcaaacacccgcctcctcaaatcatgatcaaaaacactcctgttccagccaatcctcctacaaacttcagcgcggcaaagtttgcttccttcatcacacagtattccacgggacaggtcagcgtggagatcgagtgggagctgcagaaggagaacagcaaacgctggaaccccgagatccagtacacttccaactacaacaaatctgttaatgtggactttactgtggacactaatggtgtgtattcagagcctcgccccattggcaccagatacctgactcgtaatctgtaa

SEQ ID NO: 4452 - DNA, 2208 bp, Artificial Sequence
  Description of Artificial Sequence: Synthetic polynucleotide
atggctgccgatggttatcttccagattggctcgaggacactctctctgaaggaataagacagtggtggaagctcaaacctggcccaccaccaccaaagcccgcagagcggcatcaggacgacagcaggggtcttgtgcttcctgggtacaagtacctcggacccttcaacggactcgacaaaggagagccggtcaacgaggcagacgctgcggccctcgagcacgacaaggcctacgaccggcagctcgacagcggagacaacccgtacctcaagtacaaccacgccgacgcggagtttcaggagcgtcttaaagaagatacgtcttttgggggcaacctcggacgagcagtcttccaggcgaaaaagagggttcttgaacctctgggcctggttgaggaacctgttaagacggctccgggaaaaaagaggccggtagagcactctcctgcggagccagactcctcctcgggaaccggaaaagcgggccagcagcctgcaagaaagagattgaatttcggtcagactggagacgcagactccgtacctgacccccagcctctcggacagccaccagcagcccccacaagtttgggatctactacaatggctacaggcagtggcgcaccaatggcagacaataacgagggtgccgatggagtgggtaattcctcaggaaattggcattgcgattcccaatggctgggcgacagagtcatcaccaccagcacccgaacctgggccctgcccacctacaacaaccacctctacaagcaaatctccagccaatcaggagcatcgaacgacaaccactactttggctacagcaccccttgggggtattttgacttcaacagattccactgtcacttctccccacgtggctggcaaagactcatcaacaacaactggggattccgacccaagagactcaacttcaagctctttaacattcaagtcaaagaggtcacgcagaatgacggtacgacgacgattgccaataaccttaccagcacggttcaggtgtttactgactcggagtaccagctcccgtacgtcctcggctcggcgcatcaaggatgcctcccgccgtttccagcggacgtcttcatggtcccacagtatggatacctcaccctgaacaacgggagtcaggcggtaggacgctcttccttttactgcctggagtactttccttctcagatgctgcgtaccggaaacaactttaccttcagctacacctttgaggacgtgcctttccacagcagctacgctcacagccagagtttggaccggctgatgaatcctctgatcgaccagtatctgtattatctgaacaggacacaatcaaatagtggaactcttcagcagtctaggctactgtttagccaagctggacccaccagcatgtctcttcaagctaaaaactggctgcctggaccttgctacagacagcagcgtctgtcaaagcaggcaaacgacaacaacaacagcaactttccctggactgcggctacaaagtatcatctaaatggtcgggactcgttggttaatccaggaccagctatggccagccacaaagacgatgaagaaaagtttttccccatgcatggaaccctgatatttggtaaacaaggaacaaatgctaacgacgcggatttggaacatgtcatgattacagatgaagaagaaatcaggaccaccaatcccgtggctacagagcagtacggaaacgtgtcaaataatttgcaaaactcaaatactggtccaactacagaaaatgtcaatcaccagggagcgttacctggtatggtgtggcaggatcgagacgtgtacctgcagggacccatttgggccaagattcctcacaccgacggacactttcacccttctccactgatgggaggttttggactcaaacacccgcctcctcaaatcatgatcaaaaacactcctgttccagccaatcctcctacaaacttcagcgcggcaaagtttgcttccttcatcacacagtattccacgggacaggtcagcgtggagatcgagtgggagctgcagaaggagaacagcaaacgctggaaccccgagatccagtacacttccaactacaacaaatctgttaatgtggactttactgtggacactaatggtgtgtattcagagcctcgccccattggcaccagatacctgactcgtaatctgtaa

SEQ ID NO: 4453 - DNA, 2208 bp, Artificial Sequence
  Description of Artificial Sequence: Synthetic polynucleotide
atggctgccgatggttatcttccagattggctcgaggacactctctctgaaggaataagacagtggtggaagctcaaacctggcccaccaccaccaaagcccgcagagcggcatcaggacgacagcaggggtcttgtgcttcctgggtacaagtacctcggacccttcaacggactcgacaaaggagagccggtcaacgaggcagacgctgcggccctcgagcacgacaaggcctacgaccggcagctcgacagcggagacaacccgtacctcaagtacaaccacgccgacgcggagtttcaggagcgtcttaaagaagatacgtcttttgggggcaacctcggacgagcagtcttccaggcgaaaaagagggttcttgaacctctgggcctggttgaggaacctgttaagacggctccgggaaaaaagaggccggtagagcactctcctgcggagccagactcctcctcgggaaccggaaaagcgggccagcagcctgcaagaaagagattgaatttcggtcagactggagacgcagactccgtacctgacccccagcctctcggacagccaccagcagcccccacaagtttgggatctactacaatggctacaggcagtggcgcaccaatggcagacaataacgagggtgccgatggagtgggtaattcctcaggaaattggcattgcgattcccaatggctgggcgacagagtcatcaccaccagcacccgaacctgggccctgcccacctacaacaaccacctctacaagcaaatctccagccaatcaggagcatcgaacgacaaccactactttggctacagcaccccttgggggtattttgacttcaacagattccactgtcacttctccccacgtgactggcaaagactcatcaacaacaactggggattccgacccaagagactcaacttcaagctctttaacattcaagtcaaagaggtcacgcagaatgacggtacgacgacgattgccaataaccttaccagcacggttcaggtgtttactgactcggagtaccagctcccgtacgtcctcggctcggcgcatcaaggatgcctcccgccgtttccagcggacgtcttcatggtcccacagtatggatacctcaccctgaacaacgggagtcaggcggtaggacgctcttccttttactgcctggagtactttccttctcagatgctgcgtaccggaaacaactttaccttcagctacacctttgaggacgtgcctttccacagcagctacgctcacagccagagtttggaccggctgatgaatcctctgatcgaccagtatctgtattatctgaacgggacacaatcaaatagtggaactcttcagcagtctaggctactgtttagccaagctggacccaccagcatgtctcttcaagctaaaaactggctgcctggaccttgctacagacagcagcgtctgtcaaagcaggcaaacgacaacaacaacagcaactttccctggactgcggctacaaagtatcatctaaatggtcgggactcgttggttaatccaggaccagctatggccagccacaaagacgatgaagaaaagtttttccccatgcatggaaccctgatatttggtaaacaaggaacaaatgctaacgacgcggatttggaacatgtcatgattacagatgaagaagaaatcaggaccaccaatcccgtggctacagagcagtacggaaacgtgtcaaataatttgcaaaactcaaatactggtccaactacagaaaatgtcaatcaccagggagcgttacctggtatggtgtggcaggatcgagacgtgtacctgcagggacccatttgggccaagattcctcacaccgacggacactttcacccttctccactgatgggaggttttggactcaaacacccgcctcctcaaatcatgatcaaaaacactcctgttccagccaatcctcctacaaacttcagcgcggcaaagtttgcttccttcatcacacagtattccacgggacaggtcagcgtggagatcgagtgggagctgcagaaggagaacagcaaacgctggaaccccgagatccagtacacttccaactacaacaaatctgttaatgtggactttactgtggacactaatggtgtgtattcagagcctcgccccattggcaccagatacctgactcgtaatctgtaa

SEQ ID NO: 4454 - DNA, 2208 bp, Artificial Sequence
  Description of Artificial Sequence: Synthetic polynucleotide
atggctgccgatggttatcttccagattggctcgaggacactctctctgaaggaataagacagtggtggaagctcaaacctggcccaccaccaccaaagcccgcagagcggcatcaggacgacagcaggggtcttgtgcttcctgggtacaagtacctcggacccttcaacggactcgacaaaggagagccggtcaacgaggcagacgctgcggccctcgagcacgacaaggcctacgaccggcagctcgacagcggagacaacccgtacctcaagtacaaccacgccgacgcggagtttcaggagcgtcttaaagaagatacgtcttttgggggcaacctcggacgagcagtcttccaggcgaaaaagagggttcttgaacctctgggcctggttgaggaacctgttaagacggctccgggaaaaaagaggccggtagagcactctcctgcggagccagactcctcctcgggaaccggaaaagcgggccagcagcctgcaagaaagagattgaatttcggtcagactggagacgcagactccgtacctgacccccagcctctcggacagccaccagcagcccccacaagtttgggatctactacaatggctacaggcagtggcgcaccaatggcagacaataacgagggtgccgatggagtgggtaattcctcaggaaattggcattgcgattcccaatggctgggcgacagagtcatcaccaccagcacccgaacctgggccctgcccacctacaacaaccacctctacaagcaaatctccagccaatcaggagcatcgaacgacaaccactactttggctacagcaccccttgggggtattttgacttcaacagattccactgtcacctctccccacgtgactggcaaagactcatcaacaacaactggggattccgacccaagagactcaacttcaagctctttaacattcaagtcaaagaggtcacgcagaatgacggtacgacgacgattgccaataaccttaccagcacggttcaggtgtttactgactcggagtaccagctcccgtacgtcctcggctcggcgcatcaaggatgcctcccgccgtttccagcggacgtcttcatggtcccacagtatggatacctcaccctgaacaacgggagtcaggcggtaggacgctcttccttttactgcctggagtactttccttctcagatgctgcgtaccggaaacaactttaccttcagctacacctttgaggacgtgcctttccacagcagctacgctcacagccagagtttggaccggctgatgaatcctctgatcgaccagtatctgtattatctgaacaggacacaatcaaatagtggaactcttcagcagtctaggctactgtttagccaagctggacccaccagcatgtctcttcaagctaaaaactggctgcctggaccttgctacagacagcagcgtctgtcaaagcaggcaaacgacaacaacaacagcaactttccctggactgcggctacaaagtatcatctaaatggtcgggactcgttggttaatccaggaccagctatggccagccacaaagacgatgaagaaaagtttttccccatgcatggaaccctgatatttggtaaacaaggaacaaatgctaacgacgcggatttggaacatgtcatgattacagatgaagaagaaatcaggaccaccaatcccgtggctacagagcagtacggaaacgtgtcaaataatttgcaaaactcaaatactggtccaactacagaaaatgtcaatcaccagggagcgttacctggtatggtgtggcaggatcgagacgtgtacctgcagggacccatttgggccaagattcctcacaccgacggacactttcacccttctccactgatgggaggttttggactcaaacacccgcctcctcaaatcatgatcaaaaacactcctgttccagccaatcctcctacaaacttcagcgcggcaaagtttgcttccttcatcacacagtattccacgggacaggtcagcgtggagatcgagtgggagctgcagaaggagaacagcaaacgctggaaccccgagatccagtacacttccaactacaacaaatctgttaatgtggactttactgtggacactaatggtgtgtattcagagcctcgccccattggcaccagatacctgactcgtaatctgtaa

SEQ ID NO: 4455 - DNA, 2208 bp, Artificial Sequence
  Description of Artificial Sequence: Synthetic polynucleotide
atggctgccgatggttatcttccagattggctcgaggacactctctctgaaggaataagacagtggtggaagctcaaacctggcccaccaccaccaaagcccgcagagcggcatcaggacgacagcaggggtcttgtgcttcctgggtacaagtacctcggacccttcaacggactcgacaaaggagagccggtcaacgaggcagacgctgcggccctcgggcacgacaaggcctacgaccggcagctcgacagcggagacaacccgtacctcaagtacaaccacgccgacgcggagtttcaggagcgtcttaaagaagatacgtcttttgggggcaacctcggacgagcagtcttccaggcgaaaaagagggttcttgaacctctgggcctggttgaggaacctgttaagacggctccgggaaaaaagaggccggtagagcactctcctgcggagccagactcctcctcgggaaccggaaaagcgggccagcagcctgcaagaaagagattgaatttcggtcagactggagacgcagactccgtacctgacccccagcctctcggacagccaccagcagcccccacaagtttgggatctactacaatggctacaggcagtggcgcaccaatggcagacaataacgagggtgccgatggagtgggtaattcctcaggaaattggcattgcgattcccaatggctgggcgacagagtcatcaccaccagcacccgaacctgggccctgcccacctacaacaaccacctctacaagcaaatctccagccaatcaggagcatcgaacgacgaccactactttggctacagcaccccttgggggtattttgacttcaacagattccactgtcacttctccccacgtgactggcaaagactcatcaacaacaactggggattccgacccaagagactcaacttcaagctctttaacattcaagtcaaagaggtcacgcagaatgacggtacgacgacgattgccaataaccttaccagcacggttcaggtgtttactgactcggagtaccagctcccgtacgtcctcggctcggcgcatcaaggatgcctcccgccgtttccagcggacgtcttcatggtcccacagtatggatacctcaccctgaacaacgggagtcaggcggtaggacgctcttccttttactgcctggagtactttccttctcagatgctgcgtaccggaaacaactttaccttcagctacacctttgaggacgtgcctttccacagcagctacgctcacagccagagtttggaccggctgatgaatcctctgatcgaccagtatctgtattatctgaacaggacacaatcaaatagtggaactcttcagcagtctaggctactgtttagccaagctggacccaccagcatgtctcttcaagctaaaaactggctgcctggaccttgctacagacagcagcgtctgtcaaagcaggcaaacgacaacaacaacagcaactttccctggactgcggctacaaagtatcatctaaatggtcgggactcgttggttaatccaggaccagctatggccagccacaaagacgatgaagaaaagtttttccccatgcatggaaccctgatatttggtaaacaaggaacaaatgctaacgacgcggatttggaacatgtcatgattacagatgaagaagaaatcaggaccaccaatcccgtggctacagagcagtacggaaacgtgtcaaataatttgcaaaactcaaatactggtccaactacagaaaatgtcaatcaccagggagcgttacctggtatggtgtggcaggatcgagacgtgtacctgcagggacccatttgggccaagattcctcacaccgacggacactttcacccttctccactgatgggaggttttggactcaaacacccgcctcctcaaatcatgatcaaaaacactcctgttccagccaatcctcctacaaacttcagcgcggcaaagtttgcttccttcatcacacagtattccacgggacaggtcagcgtggagatcgagtgggagctgcagaaggagaacagcaaacgctggaaccccgagatccagtacacttccaactacaacaaatctgttaatgtggactttactgtggacactaatggtgtgtattcagagcctcgccccattggcaccagatacctgactcgtaatctgtaa

SEQ ID NO: 4456 - DNA, 2208 bp, Artificial Sequence
  Description of Artificial Sequence: Synthetic polynucleotide
atggctgccgatggttatcttccagattggctcgaggacactctctctgaaggaataagacagtggtggaagctcaaacctggcccaccaccaccaaagcccgcagagcggcatcaggacgacagcaggggtcttgtgcttcctgggtacaagtacctcggacccttcaacggactcgacaaaggagagccggtcaacgaggcagacgctgcggccctcgagcacgacaaggcctacgaccggcagctcgacagcggagacaacccgtacctcaagtacaaccacgccgacgcggagtttcaggagcgtcttaaagaagatacgtcttttgggggcaacctcggacgagcagtcttccaggcgaaaaagagggttcttgaacctctgggcctggttgaggaacctgttaagacggctccgggaaaaaagaggccggtagagcactctcctgcggagccagactcctcctcgggaaccggaaaagcgggccagcagcctgcaagaaagagattgaatttcggtcagactggagacgcagactccgtacctgacccccagcctctcggacagccaccagcagcccccacaagtttgggatctactacaatggctacaggcagtggcgcaccaatggcagacaataacgagggtgccgatggagtgggtaattcctcaggaaattggcattgcgattcccaatggctgggcgacagagtcatcaccaccagcacccgaacctgggccctgcccacctacaacaaccacctctacaagcaaatctccagccaatcaggagcatcgaacgacaaccactactttggctacagcaccccttgggggtattttgacttcaacagattccactgtcacttctccccacgtgactggcaaagactcatcaacaacaactggggattccgacccaagagactcaacttcaagctctttaacattcaagtcaaagaggtcacgcagaatgacggtacgacgacgattgccaataaccttaccagcacggttcaggtgtttactgactcggagtaccagctcccgtacgtcctcggctcggcgcatcaaggatgcctcccgccgtttccagcggacgtcttcatggtcccacagtatggatacctcaccctgaacaacgggagtcaggcggtaggacgctcttccttttactgcctggagtactttccttctcagatgctgcgtaccggaaacaactttaccttcagctacacctttgaggacgtgcctttccacagcagctacgctcacagccagagtttggaccggctgatgaatcctctgatcgaccagtatctgtattatctgaacaggacacaatcaaatagtggaactcttcagcagtctaggctactgtttagccaagctggacccaccagcatgtctcttcaagctaaaaactggctgcctggaccttgctacagacagcagcgtctgtcaaagcaggcaaacgacaacaacaacagcaactttccctggactgcggctacaaagtatcatctaaatggtcgggactcgttggttaatccaggaccagctatggccagccacaaagacgatgaagaaaagtttttccccatgcatggaaccctgatatttggtaaacaaggaacaaatgctaacgacgcggatttggaacatgtcatgattacagatgaagaagaaatcaggaccaccaatcccgtggctacagagcagtacggaaacgtgtcaaataatttgcaaaactcaaatactggtccaactacagaaaatgtcaatcaccagggagcgttacctggtatggtgtggcaggatcgagacgtgtacctgcagggacccatttgggccaagattcctcacaccgacggacactttcgcccttctccactgatgggaggttttggactcaaacacccgcctcctcaaatcatgatcaaaaacactcctgttccagccaatcctcctacaaacttcagcgcggcaaagtttgcttccttcatcacacagtattccacgggacaggtcagcgtggagatcgagtgggagctgcagaaggagaacagcaaacgctggaaccccgagatccagtacacttccaactacaacaaatctgttaatgtggactttactgtggacactaatggtgtgtattcagagcctcgccccattggcaccagatacctgactcgtaatctgtaa

SEQ ID NO: 4457 - DNA, 2208 bp, Artificial Sequence
  Description of Artificial Sequence: Synthetic polynucleotide
atggctgccgatggttatcttccagattggctcgaggacactctctctgaaggaataagacagtggtggaagctcaaacctggcccaccaccaccaaagcccgcagagcggcatcaggacgacagcaggggtcttgtgcttcctgggtacaagtacctcggacccttcaacggactcgacaaaggagagccggtcaacgaggcagacgctgcggccctcgagcacgacaaggcctacgaccggcagctcgacagcggagacaacccgtacctcaagtacaaccacgccgacgcggagtttcaggagcgtcttaaagaagatacgtcttttgggggcaacctcggacgagcagtcttccaggcgaaaaagagggttcttgaacctctgggcctggttgaggaacctgttaagacggctccgggaaaaaagaggccggtagagcactctcctgcggagccagactcctcctcgggaaccggaaaagcgggccagcagcctgcaagaaagagattgaatttcggtcagactggagacgcagactccgtacctgacccccagcctctcggacagccaccagcagcccccacaagtttgggatctactacaatggctacaggcagtggcgcaccaatggcagacaataacgagggtgccgatggagtgggtaattcctcaggaaattggcattgcgattcccaatggctgggcgacagagtcatcaccaccagcacccgaacctgggccctgcccacctacaacaaccacctctacaagcaaatctccagccaatcaggagcatcgaacgacaaccactactttggctacagcaccccttgggggtattttgacttcaacagattccactgtcacttctccccacgtgactggcaaagactcatcaacaacaactggggattccgacccaagagactcaacttcaagctctttaacattcaagtcaaagaggtcacgcagaatgacggtacgacgacgattgccaataaccttaccagcacggttcaggtgtttactgactcggagtaccagctcccgtacgtcctcggctcggcgcatcaaggatgcctcccgccgtttccagcggacgtcttcatggtcccacagtatggatacctcaccctgaacaacgggagtcaggcggtaggacgctcttccttttactgcctggagtactttccttctcagatgctgcgtaccggaaacaactttaccttcagctacacctttgaggacgtgcctttccacagcagctacgctcacagccagagtttggaccggctgatgaatcctctgatcgaccagtatctgtattatctgaacaggacacaatcaaatagtggaactcttcagcagtctaggctactgtttagccaagctggacccaccagcatgtctcttcaagctaaaaactggctgcctggaccttgctacagacagcagcgtctgtcaaagcaggcaaacgacaacaacaacagcaactttccctggactgcggctacaaagtatcatctaaatggtcgggactcgttggttaatccaggaccagctatggccagccacaaagacgatgaagaaaagtttttccccatgcatggaaccctgatatttggtaaacaaggaacaaatgctaacgacgcggatttggaacatgtcatgattacagatgaagaagaaatcaggaccaccaatcccgtggctacagagcagtacggaaacgtgtcaaataatttgcaaaactcaaatactggtccaactacagaaaatgtcaatcaccagggagcgttacctggtatggtgtggcaggatcgagacgtgtacctgcagggacccatttgggccaagattcctcacaccgacggacactttcacccttctccactgatgggaggttttggactcaaacacccgcctcctcaaatcatgatcaaaaacactcctgttccagccaatcctcctacaaacttcagcgcggcaaagtctgcttccttcatcacacagtattccacgggacaggtcagcgtggagatcgagtgggagctgcagaaggagaacagcaaacgctggaaccccgagatccagtacacttccaactacaacaaatctgttaatgtggactttactgtggacactaatggtgtgtattcagagcctcgccccattggcaccagatacctgactcgtaatctgtaa

SEQ ID NO: 4458 - DNA, 2208 bp, Artificial Sequence
  Description of Artificial Sequence: Synthetic polynucleotide
atggctgccgatggttatcttccagattggctcgaggacactctctctgaaggaataagacagtggtggaagctcaaacctggcccaccaccaccaaagcccgcagagcggcatcaggacgacagcaggggtcttgtgcttcctgggtacaagtacctcggacccttcaacggactcgacaaaggagagccggtcaacgaggcagacgctgcggccctcgagcacgacaaggcctacgaccggcagctcgacagcggagacaacccgtacctcaagtacaaccacgccgacgcggagtttcaggagcgtcttaaagaagatacgtcttttgggggcaacctcggacgagcagtcttccaggcgaaaaagagggttcttgaacctctgggcctggttgaggaacctgttaagacggctccgggaaaaaagaggccggtagagcactctcctgcggagccagactcctcctcgggaaccggaaaagcgggccagcagcctgcaagaaagagattgaatttcggtcagactggagacgcagactccgtacctgacccccagcctctcggacagccaccagcagcccccacaagtttgggatctactacaatggctacaggcagtggcgcaccaatggcagacaataacgagggtgccgatggagtgggtaattcctcaggaaattggcattgcgattcccaatggctgggcgacagagtcatcaccaccagcacccgaacctgggccctgcccacctacaacaaccacctctacaagcaaatctccagccaatcaggagcatcgaacgacaaccactactttggctacagcaccccttgggggtattttgacttcaacagattccactgtcacttctccccacgtgactggcaaagactcatcaacaacaactggggattccgacccaagagactcaacttcaagctctttaacattcaagtcaaaggggtcacgcagaatgacggtacgacgacgattgccaataaccttaccagcacggttcaggtgtttactgactcggagtaccagctcccgtacgtcctcggctcggcgcatcaaggatgcctcccgccgtttccagcggacgtcttcatggtcccacagtatggatacctcaccctgaacaacgggagtcaggcggtaggacgctcttccttttactgcctggagtactttccttctcagatgctgcgtaccggaaacaactttaccttcagctacacctttgaggacgtgcctttccacagcagctacgctcacagccagagtttggaccggctgatgaatcctctgatcgaccagtatctgtattatctgaacaggacacaatcaaatagtggaactcttcagcagtctaggctactgtttagccaagctggacccaccagcatgtctcttcaagctaaaaactggctgcctggaccttgctacagacagcagcgtctgtcaaagcaggcaaacgacaacaacaacagcaactttccctggactgcggctacaaagtatcatctaaatggtcgggactcgttggttaatccaggaccagctatggccagccacaaagacgatgaagaaaagtttttccccatgcatggaaccctgatatttggtaaacaaggaacaaatgctaacgacgcggatttggaacatgtcatgattacagatgaagaagaaatcaggaccaccaatcccgtggctacagagcagtacggaaacgtgtcaaataatttgcaaaactcaaatactggtccaactacagaaaatgtcaatcaccagggagcgttacctggtatggtgtggcaggatcgagacgtgtacctgcagggacccatttgggccaagattcctcacaccgacggacactttcacccttctccactgatgggaggttttggactcaaacacccgcctcctcaaatcatgatcaaaaacactcctgttccagccaatcctcctacaaacttcagcgcggcaaagtttgcttccttcatcacacagtattccacgggacaggtcagcgtggagatcgagtgggagctgcagaaggagaacagcaaacgctggaaccccgagatccagtacacttccaactacaacaaatctgttaatgtggactttactgtggacactaatggtgtgtattcagagcctcgccccattggcaccagatacctgactcgtaatctgtaa

SEQ ID NO: 4459 - DNA, 2208 bp, Artificial Sequence
  Description of Artificial Sequence: Synthetic polynucleotide
atggctgccgatggttatcttccagattggctcgaggacactctctctgaaggaataagacagtggtggaagctcaaacctggcccaccaccaccaaagcccgcagagcggcatcaggacgacagcaggggtcttgtgcttcctgggtacaagtacctcggacccttcaacggactcgacaaaggagagccggtcaacgaggcagacgctgcggccctcgagcacgacaaggcctacgaccggcagctcgacagcggagacaacccgtacctcaagtacaaccacgccgacgcggagtttcaggagcgtcttaaagaagatacgtcttttgggggcaacctcggacgagcagtcttccaggcgaaaaagagggttcttgaacctctgggcctggttgaggaacctgttaagacggctccgggaaaaaagaggccggtagagcactctcctgcggagccagactcctcctcgggaaccggaaaagcgggccagcagcctgcaagaaagagattgaatttcggtcagactggagacgcagactccgtacctgacccccagcctctcggacagccaccagcagcccccacaagtttgggatctactacaatggctacaggcagtggcgcaccaatggcagacaataacgagggtgccgatggagtgggtaattcctcaggaaattggcattgcgattcccaatggctgggcgacagagtcatcaccaccagcacccgaacctgggccctgcccacctacaacaaccacctctacaagcaaatctccagccaatcaggagcatcgaacgacaaccactactttggctacagcaccccttgggggtattttgacttcaacagattccactgtcacttctccccacgtgactggcaaagactcatcaacaacaactggggattccgacccaagagactcaacttcaagctctttaacattcaagtcaaagaggtcacgcagaatgacggtacgacgacgattgccaataaccttaccagcacggttcaggtgtttactgactcggagtaccagctcccgtacgtcctcggctcggcgcatcaaggatgcctcccgccgtttccagcggacgtcttcatggtcccacagtatggatacctcaccctgaacaacgggagtcaggcggtaggacgctcttccttttactgcctggagtactttccttctcagatgctgcgtaccggaaacaactttaccttcagctacacctttgaggacgtgcctttccacagcagctacgctcacagccagagtttggaccggctgatgaatcctctgatcgaccagtatctgtattatctgaacaggacacaatcaaatagtggaactcttcagcagtctaggctactgtttagccaagctggacccaccagcatgtctcttcaagctaaaaactggctgcctggaccttgctacagacagcagcgtctgtcaaagcaggcaaacgacaacaacaacagcaactttccctggactgcggctacaaagtatcatctaaatggtcgggactcgttggttaatccaggaccagctatggccagccacaaagacgatgaagaaaagtttttccccatgcatggaaccccgatatttggtaaacaaggaacaaatgctaacgacgcggatttggaacatgtcatgattacagatgaagaagaaatcaggaccaccaatcccgtggctacagagcagtacggaaacgtgtcaaataatttgcaaaactcaaatactggtccaactacagaaaatgtcaatcaccagggagcgttacctggtatggtgtggcaggatcgagacgtgtacctgcagggacccatttgggccaagattcctcacaccgacggacactttcacccttctccactgatgggaggttttggactcaaacacccgcctcctcaaatcatgatcaaaaacactcctgttccagccaatcctcctacaaacttcagcgcggcaaagtttgcttccttcatcacacagtattccacgggacaggtcagcgtggagatcgagtgggagctgcagaaggagaacagcaaacgctggaaccccgagatccagtacacttccaactacaacaaatctgttaatgtggactttactgtggacactaatggtgtgtattcagagcctcgccccattggcaccagatacctgactcgtaatctgtaa

SEQ ID NO: 4460 - DNA, 2208 bp, Artificial Sequence
  Description of Artificial Sequence: Synthetic polynucleotide
atggctgccgatggttatcttccagattggctcgaggacactctctctgaaggaataagacagtggtggaagctcaaacctggcccaccaccaccaaagcccgcagagcggcatcaggacgacagcaggggtcttgtgcttcctgggtacaagtacctcggacccttcaacggactcgacaaaggagagccggtcaacgaggcagacgctgcggccctcgagcacgacaaggcctacgaccggcagctcgacagcggagacaacccgtacctcaagtacaaccacgccgacgcggagtttcaggagcgtcttaaagaagatacgtcttttgggggcaacctcggacgagcagtcttccaggcgaaaaagggggttcttgaacctctgggcctggttgaggaacctgttaagacggctccgggaaaaaagaggccggtagagcactctcctgcggagccagactcctcctcgggaaccggaaaagcgggccagcagcctgcaagaaagagattgaatttcggtcagactggagacgcagactccgtacctgacccccagcctctcggacagccaccagcagcccccacaagtttgggatctactacaatggctacaggcagtggcgcaccaatggcagacaataacgagggtgccgatggagtgggtaattcctcaggaaattggcattgcgattcccaatggctgggcgacagagtcatcaccaccagcacccgaacctgggccctgcccacctacaacaaccacctctacaagcaaatctccagccaatcaggagcatcgaacgacaaccactactttggctacagcaccccttgggggtattttgacttcaacagattccactgtcacttctccccacgtgactggcaaagactcatcaacaacaactggggattccgacccaagagactcaacttcaagctctttaacattcaagtcaaagaggtcacgcagaatgacggtacgacgacgattgccaataaccttaccagcacggttcaggtgtttactgactcggagtaccagctcccgtacgtcctcggctcggcgcatcaaggatgcctcccgccgtttccagcggacgtcttcatggtcccacagtatggatacctcaccctgaacaacgggagtcaggcggtaggacgctcttccttttactgcctggagtactttccttctcagatgctgcgtaccggaaacaactttaccttcagctacacctttgaggacgtgcctttccacagcagctacgctcacagccagagtttggaccggctgatgaatcctctgatcgaccagtatctgtattatctgaacaggacacaatcaaatagtggaactcttcagcagtctaggctactgtttagccaagctggacccaccagcatgtctcttcaagctaaaaactggctgcctggaccttgctacagacagcagcgtctgtcaaagcaggcaaacgacaacaacaacagcaactttccctggactgcggctacaaagtatcatctaaatggtcgggactcgttggttaatccaggaccagctatggccagccacaaagacgatgaagaaaagtttttccccatgcatggaaccctgatatttggtaaacaaggaacaaatgctaacgacgcggatttggaacatgtcatgattacagatgaagaagaaatcaggaccaccaatcccgtggctacagagcagtacggaaacgtgtcaaataatttgcaaaactcaaatactggtccaactacagaaaatgtcaatcaccagggagcgttacctggtatggtgtggcaggatcgagacgtgtacctgcagggacccatttgggccaagattcctcacaccgacggacactttcacccttctccactgatgggaggttttggactcaaacacccgcctcctcaaatcatgatcaaaaacactcctgttccagccaatcctcctacaaacttcagcgcggcaaagtttgcttccttcatcacacagtattccacgggacaggtcagcgtggagatcgagtgggagctgcagaaggagaacagcaaacgctggaaccccgagatccagtacacttccaactacaacaaatctgttaatgtggactttactgtggacactaatggtgtgtattcagagcctcgccccattggcaccagatacctgactcgtaatctgtaa

SEQ ID NO: 4461 - DNA, 2208 bp, Artificial Sequence
  Description of Artificial Sequence: Synthetic polynucleotide
atggctgccgatggttatcttccagattggctcgaggacactctctctgaaggaataagacagtggtggaagctcaaacctggcccaccaccaccaaagcccgcagagcggcatcaggacgacagcaggggtcttgtgcttcctgggtacaagtacctcggacccttcaacggactcgacaaaggagagccggtcaacgaggcagacgctgcggccctcgagcacgacaaggcctacgaccggcagctcgacagcggagacaacccgtacctcaagtacaaccacgccgacgcggagtttcaggagcgtcttaaagaagatacgtcttttgggggcaacctcggacgagcagtcttccaggcgaaaaagagggttcttgaacctctgggcctggttgaggaacctgttaagacggctccgggaaaaaagaggccggtagagcactctcctgcggagccagactcctcctcgggaaccggaaaagcgggccagcagcctgcaagaaagagattgaatttcggtcagactggagacgcagactccgtacctgacccccagcctctcggacagccaccagcagcccccacaagtttgggatctactacaatggctacaggcagtggcgcaccaatggcagacaataacgagggtgccgatggagtgggtaattcctcaggaaattggcattgcgattcccaatggctgggcgacagagtcatcaccaccagcacccgaacctgggccctgcccacctacaacaaccacctctacaagcaaatctccagccaatcaggagcatcgaacgacaaccactactttggctacagcaccccttgggggtattttgacttcaacagattccactgtcacttctccccacgtgactggcaaagactcatcaacaacaactggggattccgacccaagagactcaacttcaagctctttaacattcaagtcaaagaggtcacgcagaatgacggtacgacgacgattgccaataaccttaccagcacggttcaggtgtttactgactcggagtaccagctcccgtacgtcctcggctcggcgcatcaaggatgcctcccgccgtttccagcggacgtcttcatggtcccacagtatggatacctcaccctgaacaacgggagtcaggcggtaggacgctcttccttttactgcctggagtactttccttctcagatgctgcgtaccggaaacaactttaccttcagctacacctttgaggacgtgcctttccacagcagctacgctcacagccagagtttggaccggctgatgaatcctctgatcggccagtatctgtattatctgaacaggacacaatcaaatagtggaactcttcagcagtctaggctactgtttagccaagctggacccaccagcatgtctcttcaagctaaaaactggctgcctggaccttgctacagacagcagcgtctgccaaagcaggcaaacgacaacaacaacagcaactttccctggactgcggctacaaagtatcatctaaatggtcgggactcgttggttaatccaggaccagctatggccagccacaaagacgatgaagaaaagtttttccccatgcatggaaccctgatatttggtaaacaaggaacaaatgctaacgacgcggatttggaacatgtcatgattacagatgaagaagaaatcaggaccaccaatcccgtggctacagagcagtacggaaacgtgtcaaataatttgcaaaactcaaatactggtccaactacagaaaatgtcaatcaccagggagcgttacctggtatggtgtggcaggatcgagacgtgtacctgcagggacccatttgggccaagattcctcacaccgacggacactttcacccttctccactgatgggaggttttggactcaaacacccgcctcctcaaatcatgatcaaaaacactcctgttccagccaatcctcctacaaacttcagcgcggcaaagtttgcttccttcatcacacagtattccacgggacaggtcagcgtggagatcgagtgggagctgcagaaggagaacagcaaacgctggaaccccgagatccagtacacttccaactacaacaaatctgttaatgtggactttactgtggacactaatggtgtgtattcagagcctcgccccattggcaccagatacctgactcgtaatctgtaa

SEQ ID NO: 4462 - DNA, 2208 bp, Artificial Sequence
  Description of Artificial Sequence: Synthetic polynucleotide
atggctgccgatggttatcttccagattggctcgaggacactctctctgaaggaataagacagtggtggaagctcaaacctggcccaccaccaccaaagcccgcagagcggcatcaggacgacagcaggggtcttgtgcttcctgggtacaagtacctcggacccttcaacggactcgacaaaggagagccggtcaacgaggcagacgctgcggccctcgagcacgacaaggcctacgaccggcagctcgacagcggagacaacccgtacctcaagtacaaccacgccgacgcggagtttcaggagcgtcttaaagaagatacgtcttttgggggcaacctcggacgagcagtcttccaggcgaaaaagagggttcttgaacctctgggcctggttgaggaacctgttaagacggctccgggaaaaaagaggccggtagagcactctcctgcggagccagactcctcctcgggaaccggaaaagcgggccagcagcctgcaagaaagagattgaatttcggtcagactggagacgcagactccgtacctgacccccagcctctcggacagccaccagcagcccccacaagtttgggatctactacaatggctacaggcagtggcgcaccaatggcagacaataacgagggtgccgatggagtgggtaattcctcaggaaattggcattgcgattcccaatggctgggcgacagagtcatcaccaccagcacccgaacctgggccctgcccacctacaacaaccacctctacaagcaaatctccagccaatcaggagcatcgaacgacaaccactactttggctacagcaccccttgggggtattttgacttcaacagattccactgtcacttctccccacgtgactggcaaagactcatcaacaacaactggggattccgacccaagagactcaacttcaagctctttaacattcaagtcaaagaggtcacgcagaatgacggtacgacgacgattgccaataaccttaccagcacggttcaggtgtttactgactcggagtaccagctcccgtacgtcctcggctcggcgcatcaaggatgcctcccgccgtttccagcggacgtcttcatggtcccacagtatggatacctcaccctgaacaacgggagtcaggcggtaggacgctcttccttttactgcctggagtactttccttctcagatgctgcgtaccggaaacaactttaccttcagctacacctttgaggacgtgcctttccacagcagctacgctcacagccagagtttggaccggctgatgaatcctctgatcgaccagtatctgtattatctgaacaggacacaatcaaatagtggaactcttcagcagtctaggctactgtttagccaagctggacccaccagcatgtctcttcaagctaaaaactggctgcctggaccttgctacagacagcagcgtctgtcaaagcaggcaaacgacaacaacaacagcaactttccctggactgcggctacaaagtatcatctaaatggtcgggactcgttggttaatccaggaccagctatggccagccacaaagacgatgaagaaaagtttttccccatgcatggaaccctgatatttggtaaacaaggaacaaatgctaacgacgcggatttggaacatgtcatgattacagatgaagaagaaatcaggaccaccaatcccgtggctacagagcagtacggaaacgtgtcaaataatttgcaaaactcaaatactggtccaactacagaaaatgtcaatcaccagggagcgttacctggtatggtgtggcaggatcgagacgtgtacctgcagggacccatttgggccaagattcctcacaccgacggacgctttcacccttctccactgatgggaggttttggactcaaacacccgcctcctcaaatcatgatcaaaaacactcctgttccagccaatcctcctacaaacttcagcgcggcaaagtttgcttccttcatcacacagtattccacgggacaggtcagcgtggagatcgagtgggagctgcagaaggagaacagcaaacgctggaaccccgagatccagtacacttccaactacaacaaatctgttaatgtggactttactgtggacactaatggtgtgtattcagagcctcgccccattggcaccagatacctgactcgtaatctgtaa

SEQ ID NO: 4463 - DNA, 2208 bp, Artificial Sequence
  Description of Artificial Sequence: Synthetic polynucleotide
atggctgccgatggttatcttccagattggctcgaggacactctctctgaaggaataagacagtggtggaagctcaaacctggcccaccaccaccaaagcccgcagagcggcatcaggacgacagcaggggtcttgtgcttcctgggtacaagtacctcggacccttcaacggactcgacaaaggagagccggtcaacgaggcagacgctgcggccctcgagcacgacaaggcctacgaccggcagctcgacagcggagacaacccgtacctcaagtacaaccacgccgacgcggagtttcaggagcgtcttaaagaagatacgtcttttgggggcaacctcggacgagcagtcttccaggcgaaaaagagggttcttgaacctctgggcctggttgaggaacctgttaagacggctccgggaaaaaagaggccggtagagcactctcctgcggagccagactcctcctcgggaaccggaaaagcgggccagcagcctgcaagaaagagattgaatttcggtcagactggagacgcagactccgtacctgacccccagcctctcggacagccaccagcagcccccacaagtttgggatctactacaatggctacaggcagtggcgcaccaatggcagacaataacgagggtgccgatggagtgggtaattcctcaggaaattggcattgcgattcccaatggctgggcgacagagtcatcaccaccagcacccgaacctgggccctgcccacctacaacaaccacctctacaagcaaatctccagccaatcaggagcatcgaacgacaaccactactttggctacagcaccccttgggggtattttgacttcaacagattccactgtcacttctccccacgtgactggcaaagactcatcaacaacaactggggattccgacccaagagactcaacttcaagctctttaacattcaagtcaaagaggtcacgcagaatgacggtacgacgacgattgccaataaccttaccagcacggttcaggtgtttactgactcggagtaccagctcccgtacgtcctcggctcggcgcatcaaggatgcctcccgccgtttccagcggacgtcttcatggtcccacagtatggatacctcaccctgaacaacgggagtcaggcggtaggacgctcttccttttactgcctggagtactttccttctcagatgctgcgtaccggaaacaactttaccttcagctacacctttgaggacgtgcctttccacagcagctacgctcacagccagagtttggaccggctgatgaatcctctgatcgaccagtatctgtattatctgaacaggacacaatcaaatagtggaactcttcagcagtctaggctactgtttagccaagctggacccaccagcatgtctcttcaagctaaaaactggctgcctggaccttgctacagacagcagcgtctgtcaaagcaggcaaacgacaacaacaacagcaactttccctggactgcggctacaaagtatcatctaaatggtcgggactcgttggttaatccaggaccagctatggccagccacaaagacgatgaagaaaagtttttccccatgcatggagccctgatatttggtaaacaaggaacaaatgctaacgacgcggatttggaacatgtcatgattacagatgaagaagaaatcaggaccaccaatcccgtggctacagagcagtacggaaacgtgtcaaataatttgcaaaactcaaatactggtccaactacagaaaatgtcaatcaccagggagcgttacctggtatggtgtggcaggatcgagacgtgtacctgcagggacccatttgggccaagattcctcacaccgacggacactttcacccttctccactgatgggaggttttggactcaaacacccgcctcctcaaatcatgatcaaaaacactcctgttccagccaatcctcctacaaacttcagcgcggcaaagtttgcttccttcatcacacagtattccacgggacaggtcagcgtggagatcgagtgggagctgcagaaggagaacagcaaacgctggaaccccgagatccagtacacttccaactacaacaaatctgttaatgtggactttactgtggacactaatggtgtgtattcagagcctcgccccattggcaccagatacctgactcgtaatctgtaa

SEQ ID NO: 4464 - DNA, 2208 bp, Artificial Sequence
  Description of Artificial Sequence: Synthetic polynucleotide
atggctgccgatggttatcttccagattggctcgaggacactctctctgaaggaataagacagtggtggaagctcaaacctggcccaccaccaccaaagcccgcagagcggcatcaggacgacagcaggggtcttgtgcttcctgggtacaagtacctcggacccttcaacggactcgacaaaggagagccggtcaacgaggcagacgctgcggccctcgagcacgacaaggcctacgaccggcagctcgacagcggagacaacccgtacctcaagtacaaccacgccgacgcggagtttcaggagcgtcttaaagaagatacgtcttttgggggcaacctcggacgagcagtcttccaggcgaaaaagagggttcttgaacctctgggcctggttgaggaacctgttaagacggctccgggaaaaaagaggccggtagagcactctcctgcggagccagactcctcctcgggaaccggaaaagcgggccagcagcctgcaagaaagagattgaatttcggtcagactggagacgcagactccgtacctgacccccagcctctcggacagccaccagcagcccccacaagtttgggatctactacaatggctacaggcagtggcgcaccaatggcagacaataacgagggtgccgatggagtgggtaattcctcaggaaattggcattgcgattcccaatggctgggcgacagagtcatcaccaccagcacccgaacctgggccctgcccacctacaacaaccacctctacaagcaaatctccagccaatcaggagcatcgaacgacaaccactactttggctacagcaccccttgggggtattttgacttcaacagattccactgtcacttctccccacgtgactggcaaagactcatcaacaacaactggggattccgacccaagagactcaacttcaagctctttaacattcaagtcaaagaggtcacgcagaatgacggtacgacgacgattgccaataaccttaccagcacggttcaggtgtttactgactcggagtaccagctcccgtacgtcctcggctcggcgcatcaaggatgcctcccgccgtttccagcggacgtcttcatggtcccacagtatggatacctcaccctgaacaacgggagtcaggcggtaggacgctcttccttttactgcctggagtactttccttctcagatgctgcgtaccggaaacaactttaccttcagctacacctttgaggacgtgcctttccacagcagctacgctcacagccagagtttggaccggctgatgaatcctctgatcgaccagtatctgtattatctgaacaggacacaatcaaatagtggaactcttcagcagtctaggctactgtttagccaagctggacccaccagcatgtctcttcaagctaaaaactggctgcctggaccttgctacagacagcagcgtctgtcaaagcaggcaaacgacaacaacaacagcaactttccctggactgcggctacaaagtatcatctaaatggtcgggactcgttggttaatccaggaccagctatggccagccacaaagacgatgaagaaaagtttttccccatgcatggaaccctgatatttggtaaacaaggaacaaatgctaacgacgcggatttggaacatgccatgattacagatgaagaagaaatcaggaccaccaatcccgtggctacagagcagtacggaaacgtgtcaaataatttgcaaaactcaaatactggtccaactacagaaaatgtcaatcaccagggagcgttacctggtatggtgtggcaggatcgagacgtgtacctgcagggacccatttgggccaagattcctcacaccgacggacactttcacccttctccactgatgggaggttttggactcaaacacccgcctcctcaaatcatgatcaaaaacactcctgttccagccaatcctcctacaaacttcagcgcggcaaagtttgcttccttcatcacacagtattccacgggacaggtcagcgtggagatcgagtgggagctgcagaaggagaacagcaaacgctggaaccccgagatccagtacacttccaactacaacaaatctgttaatgtggactttactgtggacactaatggtgtgtattcagagcctcgccccattggcaccagatacctgactcgtaatctgtaa

SEQ ID NO: 4465 - DNA, 2208 bp, Artificial Sequence
  Description of Artificial Sequence: Synthetic polynucleotide
atggctgccgatggttatcttccagattggctcgaggacactctctctgaaggaataagacagtggtggaagctcaaacctggcccaccaccaccaaagcccgcagagcggcatcaggacgacagcaggggtcttgtgcttcctgggtacaagtacctcggacccttcaacggactcgacaaaggagagccggtcaacgaggcagacgctgcggccctcgagcacgacaaggcctacgaccggcagctcgacagcggagacaacccgtacctcaagtacaaccacgccgacgcggagtttcaggagcgtcttaaagaagatacgtcttttgggggcaacctcggacgagcagtcttccaggcgaaaaagagggttcttgaacctctgggcctggttgaggaacctgttaagacggctccgggaaaaaagaggccggtagagcactctcctgcggagccagactcctcctcgggaaccggaaaagcgggccagcagcctgcaagaaagagattgaatttcggtcagactggagacgcagactccgtacctgacccccagcctctcggacagccaccagcagcccccacaagtttgggatctactacaatggctacaggcagtggcgcaccaatggcagacaataacgagggtgccgatggagtgggtaattcctcaggaaattggcattgcgattcccaatggctgggcgacagagtcatcaccaccagcacccgaacctgggccctgcccacctacaacaaccacctctacaagcaaatctccagccaatcaggagcatcgaacgacaaccactactttggctacagcaccccttgggggtattttgacttcaacagattccactgtcacttctccccacgtgactggcaaagactcatcaacaacaactggggattccgacccaagagactcaacttcaagctctttaacattcaagtcaaagaggtcacgcagaatgacggtacgacgacgattgccaataaccttaccagcacggttcaggtgtttactgactcggagtaccagctcccgtacgtcctcggctcggcgcatcaaggatgcctcccgccgtttccagcggacgtcttcatggtcccacagtatggatacctcaccctgaacaacgggagtcaggcggtaggacgctcttccttttactgcctggagtactttccttctcagatgctgcgtaccggaaacaactttaccttcagctacacctttgaggacgtgcctttccacagcagctacgctcacagccagagtttggaccggctgatgaatcctctgatcgaccagtatctgtattatctgaacaggacacaatcaaatagtggaactcttcagcagtctaggctactgtttagccaagctggacccaccagcatgtctcttcaagctaaaaactggctgcctggaccttgctacagacagcagcgtctgtcaaagcaggcaaacgacaacaacaacagcaactttccctggactgcggctacaaagtatcatctaaatggtcgggactcgttggttaatccaggaccagctatggccagccacaaagacgatgaagaaaagtttttccccatgcatggaaccctgatatttggtaaacaaggaacaaatgctaacgacgcggatttggaacatgtcatgattacagatgaagaagaaatcaggaccaccaatcccgtggctacagagcagtacggaaacgtgtcaaataatttgcaaaactcaaatactggtccaactacagaaaatgtcaatcaccagggagcgttacctggtatggtgtggcaggatcgagacgtgtacctgcagggacccatttgggccaagattcctcacaccgacggacactttcacccttctccactgatgggaggttttggactcaaacacccgcctcctcaaatcatgatcaaaaacactcctgttccagccaatcctcctacaaacttcagcgcggcaaagtttgcttccttcatcacacagtattccacgggacaggtcagcgtggagatcgagtgggagctgcagaaggagaacagcaaacgctggaaccccgagatccggtacacttccaactacaacaaatctgttaatgtggactttactgtggacactaatggtgtgtattcagagcctcgccccattggcaccagatacctgactcgtaatctgtaa

SEQ ID NO: 4466 - DNA, 2208 bp, Artificial Sequence
  Description of Artificial Sequence: Synthetic polynucleotide
atggctgccgatggttatcttccagattggctcgaggacactctctctgaaggaataagacagtggtggaagctcaaacctggcccaccaccaccaaagcccgcagagcggcatcaggacgacagcaggggtcttgtgcttcctgggtacaagtacctcggacccttcaacggactcgacaaaggagagccggtcaacgaggcagacgctgcggccctcgagcacgacaaggcctacgaccggcagctcgacagcggagacaacccgtacctcaagtacaaccacgccgacgcggagtttcaggagcgtcttaaagaagatacgtcttttgggggcaacctcggacgagcagtcttccaggcgaaaaagagggttcttgaacctctgggcctggttgaggaacctgttaagacggctccgggaaaaaagaggccggtagagcactctcctgcggagccagactcctcctcgggaaccggaaaagcgggccagcagcctgcaagaaagagattgaatttcggtcagactggagacgcagactccgtacctgacccccagcctctcggacagccaccagcagcccccacaagtttgggatctactacaatggctacaggcagtggcgcaccaatggcagacaataacgagggtgccgatggagtgggtaattcctcaggaaattggcattgcgattcccaatggctgggcgacagagtcatcaccaccagcacccgaacctgggccctgcccacctacaacaaccacctctacaagcaaatctccagccaatcaggagcatcgaacgacaaccactactttggctacagcaccccttgggggtattttgacttcaacagattccactgtcacttctccccacgtgactggcaaagactcatcaacaacaactggggattccgacccaagagactcaacttcaagctctttaacattcaagtcaaagaggtcacgcagaatgacggtacgacgacgattgccaataaccttaccagcacggttcaggtgtttactgactcggagtaccagctcccgtacgtcctcggctcggcgcatcaaggatgcctcccgccgtttccagcggacgtcttcatggtcccacagtatggatacctcaccctgaacaacgggagtcaggcggtaggacgctcttccttttactgcctggagtactttccttctcagatgctgcgtaccggaaacaactttaccttcagctacacctttgaggacgtgcctttccacagcagctacgctcacagccagagtttggaccggctgatgaatcctctgatcgaccagtatctgtattatctgaacaggacacaatcaaatagtggaactcttcagcagtctaggctactgtttagccaagctggacccaccagcatgtctcttcaagctaaaaactggctgcctggaccttgctacagacagcagcgtctgtcaaagcaggcaaacgacaacaacaacagcaactttccccggactgcggctacaaagtatcatctaaatggtcgggactcgttggttaatccaggaccagctatggccagccacaaagacgatgaagaaaagtttttccccatgcatggaaccctgatatttggtaaacaaggaacaaatgctaacgacgcggatttggaacatgtcatgattacagatgaagaagaaatcaggaccaccaatcccgtggctacagagcagtacggaaacgtgtcaaataatttgcaaaactcaaatactggtccaactacagaaaatgtcaatcaccagggagcgttacctggtatggtgtggcaggatcgagacgtgtacctgcagggacccatttgggccaagattcctcacaccgacggacactttcacccttctccactgatgggaggttttggactcaaacacccgcctcctcaaatcatgatcaaaaacactcctgttccagccaatcctcctacaaacttcagcgcggcaaagtttgcttccttcatcacacagtattccacgggacaggtcagcgtggagatcgagtgggagctgcagaaggagaacagcaaacgctggaaccccgagatccagtacacttccaactacaacaaatctgttaatgtggactttactgtggacactaatggtgtgtattcagagcctcgccccattggcaccagatacctgactcgtaatctgtaa

SEQ ID NO: 4467 - DNA, 2208 bp, Artificial Sequence
  Description of Artificial Sequence: Synthetic polynucleotide
atggctgccgatggttatcttccagattggctcgaggacactctctctgaaggaataagacagtggtggaagctcaaacctggcccaccaccaccaaagcccgcagagcggcatcaggacgacagcaggggtcttgtgcttcctgggtacaagtacctcggacccttcaacggactcgacaaaggagagccggtcaacgaggcagacgctgcggccctcgagcacgacaaggcctacgaccgacagctcgacagcggagacaacccgtacctcaagtacaaccacgccgacgcggagtttcaggagcgtcttaaagaagatacgtcttttgggggcaacctcggacgagcagtcttccaggcgaaaaagagggttcttgaacctctgggcctggttgaggaacctgttaagacggctccgggaaaaaagaggccggtagagcactctcctgcggagccagactcctcctcgggaaccggaaaagcgggccagcagcctgcaagaaagagattgaatttcggtcagactggagacgcagactccgtacctgacccccagcctctcggacagccaccagcagcccccacaagtttgggatctactacaatggctacaggcagtggcgcaccaatggcagacaataacgagggtgccgatggagtgggtaattcctcaggaaattggcattgcgattcccaatggctgggcgacagagtcatcaccaccagcacccgaacctgggccctgcccacctacaacaaccacctctacaagcaaatctccagccaatcaggagcatcgaacgacaaccactactttggctacagcaccccttgggggtattttgacttcaacagattccactgtcacttctccccacgtgactggcaaagactcatcaacaacaactggggattccgacccaagagactcaacttcaagctctttaacattcaagtcaaagaggtcacgcagaatgacggtacgacgacgattgccaataaccttaccagcacggttcaggtgtttactgactcggagtaccagctcccgtacgtcctcggctcggcgcatcaaggatgcctcccgccgtttccagcggacgtcttcatggtcccacagtatggatacctcaccctgaacaacgggagtcaggcggtaggacgctcttccttttactgcctggagtactttccttctcagatgctgcgtaccggaaacaactttaccttcagctacacctttgaggacgtgcctttccacagcagctacgctcacagccagagtttggaccggctgatgaatcctctgatcggccagtatctgtattatctgaacaggacacaatcaaatagtggaactcttcagcagtctaggctactgtttagccaagctggacccaccagcatgtctcttcaagctaaaaactggctgcctggaccttgctacagacagcagcgtctgtcaaagcaggcaaacgacaacaacaacagcaactttccctggactgcggctacaaagtatcatctaaatggtcgggactcgttggttaatccaggaccagctatggccagccacaaagacgatgaagaaaagtttttccccatgcatggaaccctgatatttggtaaacaaggaacaaatgctaacgacgcggatttggaacatgtcatgattacagatgaagaagaaatcaggaccaccaatcccgtggctacagagcagtacggaaacgtgtcaaataatttgcaaaactcaaatactggtccaactacagaaaatgtcaatcaccagggagcgttacctggtatggtgtggcaggatcgagacgtgtacctgcagggacccatttgggccaagattcctcacaccgacggacactttcacccttctccactgatgggaggttttggactcaaacacccgcctcctcaaatcatgatcaaaaacactcctgttccagccaatcctcctacaaacttcagcgcggcaaagtttgcttccttcatcacacagtattccacgggacaggtcagcgtggagatcgagtgggagctgcagaaggagaacagcaaacgctggaaccccgagatccagtacacttccaactacaacaaatctgttaatgtggactttactgtggacactaatggtgtgtattcagagcctcgccccattggcaccagatacctgactcgtaatctgtaa

SEQ ID NO: 4468 - DNA, 2208 bp, Artificial Sequence
  Description of Artificial Sequence: Synthetic polynucleotide
atggctgccgatggttatcttccagattggctcgaggacactctctctgaaggaataagacagtggtggaagctcaaacctggcccaccaccaccaaagcccgcagagcggcatcaggacgacagcaggggtcttgtgcttcctgggtacaagtacctcggacccttcaacggactcgacaaaggagagccggtcaacgaggcagacgctgcggccctcgagcacgacaaggcctacgaccggcagctcgacagcggagacaacccgtacctcaagtacaaccacgccgacgcggagtttcaggagcgtcttaaagaagatacgtcttttgggggcaacctcggacgagcagtcttccaggcgaaaaagagggttcttgaacctctgggcctggttgaggaacctgttaagacggctccgggaaaaaagaggccggtagagcactctcctgcggagccagactcctcctcgggaaccggaaaagcgggccagcagcctgcaagaaagagattgaatttcggtcagactggagacgcagactccgtacctgacccccagcctctcggacagccaccagcagcccccacaagtttgggatctactacaatggctacaggcagtggcgcaccaatggcagacaataacgagggtgccgatggagtgggtaattcctcaggaaattggcattgcgattcccaatggctgggcgacagagtcatcaccaccagcacccgaacctgggccctgcccacctacaacaaccacctctacaagcaaatctccagccaatcaggagcatcgaacgacaaccactactttggctacagcaccccttgggggtattttgacttcaacagattccactgtcacttctccccacgtgactggcaaagactcatcaacaacaactggggattccgacccaagagactcaacttcaagctctttaacattcaagtcaaagaggtcacgcagaatgacggtacgacgacgattgccaataaccttaccagcacggttcaggtgtttactgactcggagtaccagctcccgtacgtcctcggctcggcgcatcaaggatgcctcccgccgtttccagcggacgtcttcatggtcccacagtatggatacctcaccctgaacaacgggagtcaggcggtaggacgctcttccttttactgcctggagtactttccttctcagatgctgcgtaccggaaacaactttaccttcagctacacctttgaggacgtgcctttccacagcagctacgctcacagccagagtttggaccggctgatgaatcctctgatcgaccagtatctgtattatctgaacaggacacaatcaaatagtggaactcttcagcagtctaggctactgtttagccaagctggacccaccagcatgtctcttcaagctaaaaactggctgcctggaccttgctacagacagcagcgtctgtcaaagcaggcaaacgacaacaacaacagcaactttccctggactgcggctacaaagtatcatctaaatggtcgggactcgttggttaatccaggaccagctatggccagccacaaagacgatgaagaaaagtttttccccatgcatggaaccctgatatttggtaaacaaggaacaaatgctaacgacgcggatttggaacatgtcatgattacagatgaagaagaaatcaggaccaccaatcccgtggctacagagcagtacggaaacgtgtcaaataatttgcaaaactcaaatactggtccaactacagaaaatgtcaatcaccagggagcgttacctggtatggtgtggcaggatcgagacgtgtacctgcagggacccatttgggccaagattcctcacaccgacggacactttcacccttctccactgatgggaggttttggactcaaacacccgcctcctcaaatcatgatcaaaaacactcctgttccagccaatcctcctacaaacttcagcgcggcaaagtttgcttccttcatcacacagtattccacgggacaggtcggcgtggagatcgagtgggagctgcagaaggagaacagcaaacgctggaaccccgagatccagtacacttccaactacaacaaatctgttaatgtggactttactgtggacactaatggtgtgtattcagagcctcgccccattggcaccagatacctgactcgtaatctgtaa

SEQ ID NO: 4469 - DNA, 2208 bp, Artificial Sequence
  Description of Artificial Sequence: Synthetic polynucleotide
atggctgccgatggttatcttccagattggctcgaggacactctctctgaaggaataagacagtggtggaagctcaaacctggcccaccaccaccaaagcccgcagagcggcatcaggacgacagcaggggtcttgtgcttcctgggtacaagtacctcggacccttcaacggactcgacaaaggagagccggtcaacgaggcagacgctgcggccctcgagcacgacaaggcctacgaccggcagctcgacagcggagacaacccgtacctcaagtacaaccacgccgacgcggagtttcaggagcgtcttaaagaagatacgtcttttgggggcaacctcggacgagcagtcttccaggcgaaaaagagggttcttgaacctctgggcctggttgaggaacctgttaagacggctccgggaaaaaagaggccggtagagcactctcctgcggagccagactcctcctcgggaaccggaaaagcgggccagcagcctgcaagaaagagattgaatttcggtcagactggagacgcagactccgtacctgacccccagcctctcggacagccaccagcagcccccacaagtttgggatctactacaatggctacaggcagtggcgcaccaatggcagacaataacgagggtgccgatggagtgggtaattcctcaggaaattggcattgcgattcccaatggctgggcgacagagccatcaccaccagcacccgaacctgggccctgcccacctacaacaaccacctctacaagcaaatctccagccaatcaggagcatcgaacgacaaccactactttggctacagcaccccttgggggtattttgacttcaacagattccactgtcacttctccccacgtgactggcaaagactcatcaacaacaactggggattccgacccaagagactcaacttcaagctctttaacattcaagtcaaagaggtcacgcagaatgacggtacgacgacgattgccaataaccttaccagcacggttcaggtgtttactgactcggagtaccagctcccgtacgtcctcggctcggcgcatcaaggatgcctcccgccgtttccagcggacgtcttcatggtcccacagtatggatacctcaccctgaacaacgggagtcaggcggtaggacgctcttccttttactgcctggagtactttccttctcagatgctgcgtaccggaaacaactttaccttcagctacacctttgaggacgtgcctttccacagcagctacgctcacagccagagtttggaccggctgatgaatcctctgatcgaccagtatctgtattatctgaacaggacacaatcaaatagtggaactcttcagcagtctaggctactgtttagccaagctggacccaccagcatgtctcttcaagctaaaaactggctgcctggaccttgctacagacagcagcgtctgtcaaagcaggcaaacgacaacaacaacagcaactttccctggactgcggctacaaagtatcatctaaatggtcgggactcgttggttaatccaggaccagctatggccagccacaaagacgatgaagaaaagtttttccccatgcatggaaccctgatatttggtaaacaaggaacaaatgctaacgacgcggatttggaacatgtcatgattacagatgaagaagaaatcaggaccaccaatcccgtggctacagagcagtacggaaacgtgtcaaataatttgcaaaactcaaatactggtccaactacagaaaatgtcaatcaccagggagcgttacctggtatggtgtggcaggatcgagacgtgtacctgcagggacccatttgggccaagattcctcacaccgacggacactttcacccttctccactgatgggaggttttggactcaaacacccgcctcctcaaatcatgatcaaaaacactcctgttccagccaatcctcctacaaacttcagcgcggcaaagtttgcttccttcatcacacagtattccacgggacaggtcagcgtggagatcgagtgggagctgcagaaggagaacagcaaacgctggaaccccgagatccagtacacttccaactacaacaaatctgttaatgtggactttactgtggacactaatggtgtgtattcagagcctcgccccattggcaccagatacctgactcgtaatctgtaa

SEQ ID NO: 4470 - DNA, 2208 bp, Artificial Sequence
  Description of Artificial Sequence: Synthetic polynucleotide
atggctgccgatggttatcttccagattggctcgaggacactctctctgaaggaataagacagtggtggaagctcaaacctggcccaccaccaccaaagcccgcagagcggcatcaggacgacagcaggggtcttgtgcttcctgggtacaagtacctcggacccttcaacggactcgacaaaggagagccggtcaacgaggcagacgctgcggccctcgagcacgacaaggcctacgaccggcagctcgacagcggagacaacccgtacctcaagtacaaccacgccgacgcggagtttcaggagcgtcttaaagaagatacgtcttttgggggcaacctcggacgagcagtcttccaggcgaaaaagagggttcttgaacctctgggcctggttgaggaacctgttaagacggctccgggaaaaaagaggccggtagagcactctcctgcggagccagactcctcctcgggaaccggaaaagcgggccagcagcctgcaagaaagagattgaatttcggtcagactggagacgcaggctccgtacctgacccccagcctctcggacagccaccagcagcccccacaagtttgggatctactacaatggctacaggcagtggcgcaccaatggcagacaataacgagggtgccgatggagtgggtaattcctcaggaaattggcattgcgattcccaatggctgggcgacagagtcatcaccaccagcacccgaacctgggccctgcccacctacaacaaccacctctacaagcaaatctccagccaatcaggagcatcgaacgacaaccactactttggctacagcaccccttgggggtattttgacttcaacagattccactgtcacttctccccacgtgactggcaaagactcatcaacaacaactggggattccgacccaagagactcaacttcaagctctttaacattcaagtcaaagaggtcacgcagaatgacggtacgacgacgattgccaataaccttaccagcacggttcaggtgtttactgactcggagtaccagctcccgtacgtcctcggctcggcgcatcaaggatgcctcccgccgtttccagcggacgtcttcatggtcccacagtatggatacctcaccctgaacaacgggagtcaggcggtaggacgctcttccttttactgcctggagtactttccttctcagatgctgcgtaccggaaacaactttaccttcagctacacctttgaggacgtgcctttccacagcagctacgctcacagccagagtttggaccggctgatgaatcctctgatcgaccagtatctgtattatctgaacaggacacaatcaaatagtggaactcttcagcagtctaggctactgtttagccaagctggacccaccagcatgtctcttcaagctaaaaactggctgcctggaccttgctacagacagcagcgtctgtcaaagcaggcaaacgacaacaacaacagcaactttccctggactgcggctacaaagtatcatctaaatggtcgggactcgttggttaatccaggaccagctatggccagccacaaagacgatgaagaaaagtttttccccatgcatggaaccctgatatttggtaaacaaggaacaaatgctaacgacgcggatttggaacatgtcatgattacagatgaagaagaaatcaggaccaccaatcccgtggctacagagcagtacggaaacgtgtcaaataatttgcaaaactcaaatactggtccaactacagaaaatgtcaatcaccagggagcgttacctggtatggtgtggcaggatcgagacgtgtacctgcagggacccatttgggccaagattcctcacaccgacggacactttcacccttctccactgatgggaggttttggactcaaacacccgcctcctcaaatcatgatcaaaaacactcctgttccagccaatcctcctacaaacttcagcgcggcaaagtttgcttccttcatcacacagtattccacgggacaggtcagcgtggagatcgagtgggagctgcagaaggagaacagcaaacgctggaaccccgagatccagtacacttccaactacaacaaatctgttaatgtggactttactgtggacactaatggtgtgtattcagagcctcgccccattggcaccagatacctgactcgtaatctgtaa

SEQ ID NO: 4471 - DNA, 2208 bp, Artificial Sequence
  Description of Artificial Sequence: Synthetic polynucleotide
atggctgccgatggttatcttccagattggctcgaggacactctctctgaaggaataagacagtggtggaagctcaaacctggcccaccaccaccaaagcccgcagagcggcatcaggacgacagcaggggtcttgtgcttcctgggtacaagtacctcggacccttcaacggactcgacaaaggagagccggtcaacgaggcagacgctgcggccctcgagcacgacaaggcctacgaccggcagctcgacagcggagacagcccgtacctcaagtacaaccacgccgacgcggagtttcaggagcgtcttaaagaagatacgtcttttgggggcaacctcggacgagcagtcttccaggcgaaaaagagggttcttgaacctctgggcctggttgaggaacctgttaagacggctccgggaaaaaagaggccggtagagcactctcctgcggagccagactcctcctcgggaaccggaaaagcgggccagcagcctgcaagaaagagattgaatttcggtcagactggagacgcagactccgtacctgacccccagcctctcggacagccaccagcagcccccacaagtttgggatctactacaatggctacaggcagtggcgcaccaatggcagacaataacgagggtgccgatggagtgggtaattcctcaggaaattggcattgcgattcccaatggctgggcgacagagtcatcaccaccagcacccgaacctgggccctgcccacctacaacaaccacctctacaagcaaatctccagccaatcaggagcatcgaacgacaaccactactttggctacagcaccccttgggggtattttgacttcaacagattccactgtcacttctccccacgtgactggcaaagactcatcaacaacaactggggattccgacccaagagactcaacttcaagctctttaacattcaagtcaaagaggtcacgcagaatgacggtacgacgacgattgccaataaccttaccagcacggttcaggtgtttactgactcggagtaccagctcccgtacgtcctcggctcggcgcatcaaggatgcctcccgccgtttccagcggacgtcttcatggtcccacagtatggatacctcaccctgaacaacgggagtcaggcggtaggacgctcttccttttactgcctggagtactttccttctcagatgctgcgtaccggaaacaactttaccttcagctacacctttgaggacgtgcctttccacagcagctacgctcacagccagagtttggaccggctgatgaatcctctgatcgaccagtatctgtattatctgaacaggacacaatcaaatagtggaactcttcagcagtctaggctactgtttagccaagctggacccaccagcatgtctcttcaagctaaaaactggctgcctggaccttgctacagacagcagcgtctgtcaaagcaggcaaacgacaacaacaacagcaactttccctggactgcggctacaaagtatcatctaaatggtcgggactcgttggttaatccaggaccagctatggccagccacaaagacgatgaagaaaagtttttccccatgcatggaaccctgatatttggtaaacaaggaacaaatgctaacgacgcggatttggaacatgtcatgattacagatgaagaagaaatcaggaccaccaatcccgtggctacagagcagtacggaaacgtgtcaaataatttgcaaaactcaaatactggtccaactacagaaaatgtcaatcaccagggagcgttacctggtatggtgtggcaggatcgagacgtgtacctgcagggacccatttgggccaagattcctcacaccgacggacactttcacccttctccactgatgggaggttttggactcaaacacccgcctcctcaaatcatgatcaaaaacactcctgttccagccaatcctcctacaaacttcagcgcggcaaagtttgcttccttcatcacacagtattccacgggacaggtcagcgtggagatcgagtgggagctgcagaaggagaacagcaaacgctggaaccccgagatccagtacacttccaactacaacaaatctgttaatgtggactttactgtggacactaatggtgtgtattcagagcctcgccccattggcaccagatacctgactcgtaatctgtaa

SEQ ID NO: 4472 - DNA, 2208 bp, Artificial Sequence
  Description of Artificial Sequence: Synthetic polynucleotide
atggctgccgatggttatcttccagattggctcgaggacactctctctgaaggaataagacagtggtggaagctcaaacctggcccaccaccaccaaagcccgcagagcggcatcaggacgacagcaggggtcttgtgcttcctgggtacaagtacctcggacccttcaacggactcgacaaaggagagccggtcaacgaggcagacgctgcggccctcgagcacgacaaggcctacgaccggcagctcgacagcggagacaacccgtacctcaagtacaaccacgccgacgcggagtttcaggagcgtcttaaagaagatacgtcttttgggggcaacctcggacgagcagtcttccaggcgaaaaagagggttcttgaacctctgggcctggttgaggaacctgttaagacggctccgggaaaaaagaggccggtagagcactctcctgcggagccagactcctcctcgggaaccggaaaagcgggccagcagcctgcaagaaagagattgaatttcggtcagactggagacgcagactccgtacctgacccccagcctctcggacagccaccagcagcccccacaagtttgggatctactacaatggctacaggcagtggcgcaccaatggcagacaataacgagggtgccgatggagtgggtaattcctcaggaaattggcattgcgattcccaatggctgggcgacagagtcatcaccaccagcacccgaacctgggccctgcccacctacaacaaccacctctacaagcaaatctccagccaatcaggagcatcgaacgacaaccactactttggctacagcaccccttgggggtattttgacttcaacagattccactgtcacttctccccacgtgactggcaaagactcatcaacaacaactggggattccgacccaagagactcaacttcaagctctttaacattcaagtcaaagaggtcacgcagaatgacggtacgacgacgattgccaataaccttaccagcacggttcaggtgtttactgactcggagtaccagctcccgtacgtcctcggctcggcgcatcaaggatgcctcccgccgtttccagcggacgtcttcatggtcccacagtatggatacctcaccctgaacaacgggagtcaggcggtaggacgctcttccttttactgcctggagtactttccttctcagatgctgcgtaccggaaacaactttaccttcagctacacctttgaggacgtgcctttccacagcagctacgctcacagccagagtttggaccggctgatgaatcctctgatcgaccagtatctgtattatctgaacaggacacaatcaaatagtggaactcttcagcagtctaggctactgtttagccaagctggacccaccagcatgtctcttcaagctaaaaactggctgcctggaccttgctacagacagcagcgtctgtcaaagcaggcaaacgacaacaacaacagcaactttccctggactgcggctacaaagtatcatctaaatggtcgggactcgttggttaatccaggaccagctatggccagccacaaagacgatgaagaaaagtttttccccatgcatggaaccctgatatttggtaaacaaggaacaaatgctaacgacgcggatttggaacatgtcatgattacagatgaagaagaaatcaggaccaccaatcccgtggctacagagcagtacggaaacgtgtcaaataatttgcaaaactcaaatactggtccaactacagaaaatgtcaatcaccagggagcgttacctggtatggtgtggcaggatcgagacgtgtacctgcagggacccatttgggccaagattcctcacaccgacggacactttcacccttctccactgatgggaggttttggactcaaacacccgcctcctcaaatcatgatcaaaaacactcctgttccagccaatcctcctacaaacttcagcgcggcaaagtttgcttccttcatcacacagtattccacgggacaggtcagcgtggagatcgagtgggagctgcagaaggagaacagcaaacgctggaaccccgagatccagtacacttccaactacaacaaatctgttaatgtggactttactgtggacactaatggtgtgtattcagagcctcgccccattggcaccagatacctgactcgtaatccgtaa

SEQ ID NO: 4473 - DNA, 2208 bp, Artificial Sequence
  Description of Artificial Sequence: Synthetic polynucleotide
atggctgccgatggttatcttccagattggctcgaggacactctctctgaaggaataagacagtggtggaagctcaaacctggcccaccaccaccaaagcccgcagagcggcatcaggacgacagcaggggtcttgtgcttcctgggtacaagtacctcggacccttcaacggactcgacaaaggagagccggtcaacgaggcagacgctgcggccctcgagcacgacaaggcctacgaccggcagctcgacagcggagacaacccgtacctcaagtacaaccacgccgacgcggagtttcaggagcgtcttaaagaagatacgtcttttgggggcaacctcggacgagcagtcttccaggcgaaaaagagggttcttgaacctctgggcctggttgaggaacctgttaagacggctccgggaaaaaagaggccggtagagcactctcctgcggagccagactcctcctcgggaaccggaaaagcgggccagcagcctgcaagaaagagattgaatttcggtcagactggagacgcagactccgtacctgacccccagcctctcggacagccaccagcagcccccacaagtttgggatctactacaatggctacaggcagtggcgcaccaatggcagacaataacgagggtgccgatggagtgggtaattcctcaggaaattggcattgcgattcccaatggctgggcgacagagtcatcaccaccagcacccgaacctgggccctgcccacctacaacaaccacctctacaagcaaatctccagccaatcaggagcatcgaacgacaaccactactttggctacagcaccccttgggggtattttgacttcaacagattccactgtcacttctccccacgtgactggcaaagactcatcaacaacaactggggattccgacccaagagactcaacttcaagctctttaacattcaagtcaaagaggtcacgcagaatgacggtacgacgacgattgccaataaccttaccagcacggttcaggtgtttactgactcggagtaccagctcccgtacgtcctcggctcggcgcatcaaggatgcctcccgccgtttccagcggacgtcttcatggtcccacagtatggatacctcaccctgaacaacgggagtcaggcggtaggacgctcttccttttactgcctggagtactttccttctcagatgctgcgtaccggaaacaactttaccttcagctacacctttgaggacgtgcctttccacagcagctacgctcacagccagagtttggaccggctgatgaatcctctgatcgaccagtatctgtattatctgaacaggacacaatcaaatagtggaactcttcagcagtctaggctactgtttagccaagctggacccaccagcatgtctcttcaagctaaaaactggctgcctggaccttgctacagacagcagcgtccgtcaaagcaggcaaacgacaacaacaacagcaactttccctggactgcggctacaaagtatcatctaaatggtcgggactcgttggttaatccaggaccagctatggccagccacaaagacgatgaagaaaagtttttccccatgcatggaaccctgatatttggtaaacaaggaacaaatgctaacgacgcggatttggaacatgtcatgattacagatgaagaagaaatcaggaccaccaatcccgtggctacagagcagtacggaaacgtgtcaaataatttgcaaaactcaaatactggtccaactacagaaaatgtcaatcaccagggagcgttacctggtatggtgtggcaggatcgagacgtgtacctgcagggacccatttgggccaagattcctcacaccgacggacactttcacccttctccactgatgggaggttttggactcaaacacccgcctcctcaaatcatgatcaaaaacactcctgttccagccaatcctcctacaaacttcagcgcggcaaagtttgcttccttcatcacacagtattccacgggacaggtcagcgtggagatcgagtgggagctgcagaaggagaacagcaaacgctggaaccccgagatccagtacacttccaactacaacaaatctgttaatgtggactttactgtggacactaatggtgtgtattcagagcctcgccccattggcaccagatacctgactcgtaatctgtaa

SEQ ID NO: 4474 - DNA, 2208 bp, Artificial Sequence
  Description of Artificial Sequence: Synthetic polynucleotide
atggctgccgatggttatcttccagattggctcgaggacactctctctgaaggaataagacagtggtggaagctcaaacctggcccaccaccaccaaagcccgcagagcggcatcaggacgacagcaggggtcttgtgcttcctgggtacaagtacctcggacccttcaacggactcgacaaaggagagccggtcaacgaggcagacgctgcggccctcgagcacgacaaggcctacgaccggcagctcgacagcggagacaacccgtacctcaagtacaaccacgccgacgcggagtttcaggagcgtcttaaagaagatacgtcttttgggggcaacctcggacgagcagtcttccaggcgaaaaagagggttcttgaacctctgggcctggttgaggaacctgttaagacggctccgggaaaaaagaggccggtagagcactctcctgcggagccagactcctcctcgggaaccggaaaagcgggccagcagcctgcaagaaagagattgaatttcagtcagactggagacgcagactccgtacctgacccccagcctctcggacagccaccagcagcccccacaagtttgggatctactacaatggctacaggcagtggcgcaccaatggcagacaataacgagggtgccgatggagtgggtaattcctcaggaaattggcattgcgattcccaatggctgggcgacagagtcatcaccaccagcacccgaacctgggccctgcccacctacaacaaccacctctacaagcaaatctccagccaatcaggagcatcgaacgacaaccactactttggctacagcaccccttgggggtattttgacttcaacagattccactgtcacttctccccacgtgactggcaaagactcatcaacaacaactggggattccgacccaagagactcaacttcaagctctttaacattcaagtcaaagaggtcacgcagaatgacggtacgacgacgattgccaataaccttaccagcacggttcaggtgtttactgactcggagtaccagctcccgtacgtcctcggctcggcgcatcaaggatgcctcccgccgtttccagcggacgtcttcatggtcccacagtatggatacctcaccctgaacaacgggagtcaggcggtaggacgctcttccttttactgcctggagtactttccttctcagatgctgcgtaccggaaacaactttaccttcagctacacctttgaggacgtgcctttccacagcagctacgctcacagccagagtttggaccggctgatgaatcctctgatcgaccagtatctgtattatctgaacaggacacaatcaaatagtggaactcttcagcagtctaggctactgtttagccaagctggacccaccagcatgtctcttcaagctaaaaactggctgcctggaccttgctacagacagcagcgtctgtcaaagcaggcaaacgacaacaacaacagcaactttccctggactgcggctacaaagtatcatctaaatggtcgggactcgttggttaatccaggaccagctatggccagccacaaagacgatgaagaaaagtttttccccatgcatggaaccctgatatttggtaaacaaggaacaaatgctaacgacgcggatttggaacatgtcatgattacagatgaagaagaaatcaggaccaccaatcccgtggctacagagcagtacggaaacgtgtcaaataatttgcaaaactcaaatactggtccaactacagaaaatgtcaatcaccagggagcgttacctggtatggtgtggcaggatcgagacgtgtacctgcagggacccatttgggccaagattcctcacaccgacggacactttcacccttctccactgatgggaggttttggactcaaacacccgcctcctcaaatcatgatcaaaaacactcctgttccagccaatcctcctacaaacttcagcgcggcaaagtttgcttccttcatcacacagtattccacgggacaggtcagcgtggagatcgagtgggagctgcagaaggagaacagcaaacgctggaaccccgagatccagtacacttccaactacaacaaatctgttaatgtggactttactgtggacactaatggtgtgtattcagagcctcgccccattggcaccagatacctgactcgtaatctgtaa

SEQ ID NO: 4475 - DNA, 2208 bp, Artificial Sequence
  Description of Artificial Sequence: Synthetic polynucleotide
atggctgccgatggttatcttccagattggctcgaggacactctctctgaaggaataagacagtggtggaagctcaaacctggcccaccaccaccaaagcccgcagagcggcatcaggacgacagcaggggtcttgtgcttcctgggtacaagtacctcggacccttcaacggactcgacaaaggagagccggtcaacgaggcagacgctgcggccctcgagcacgacaaggcctacgaccggcagctcgacagcggagacaacccgtacctcaagtacaaccacgccgacgcggagtttcaggagcgtcttaaagaagatacgtcttttgggggcaacctcggacgagcagtcttccaggcgaaaaagagggttcttgaacctctgggcctggttgaggaacctgttaagacggctccgggaaaaaagaggccggtagagcactctcctgcggagccagactcctcctcgggaaccggaaaagcgggccagcagcctgcaagaaagagattgaatttcggtcagactggagacgcagactccgtacctgacccccagcctctcggacagccaccagcagcccccacaagtttgggatctactacaatggctacaggcagtggcgcaccaatggcagacaataacgagggtgccgatggagtgggtaattcctcaggaaattggcattgcgattcccaatggctgggcgacagagtcatcaccaccagcacccgaacctgggccctgcccacctacaacaaccacctctacaagcaaatctccagccaatcaggagcatcgaacgacaaccactactttggctacagcaccccttgggggtattttgacttcaacagattccactgtcacttctccccacgtgactggcaaagactcatcaacaacaactggggattccgacccaagagactcaacttcaagctctttaacattcaagtcaaagaggtcacgcagaatgacggtacgacgacgattgccaataaccttaccagcacggttcaggtgtttactgactcggagtaccagctcccgtacgtcctcggctcggcgcatcaaggatgcctcccgccgtttccagcggacgtcttcatggtcccacagtatggatacctcaccctgaacaacgggagtcaggcggtaggacgctcttccttttactgcctggagtactttccttctcagatgctgcgtaccggaaacaactttaccttcagctacacctttgaggacgtgcctttccacagcagctacgctcacagccagagtttggaccggctgatgaatcctctgatcgaccagtatctgtattatctgaacaggacacaatcaaatagtggaactcttcagcagtctaggctactgtttagccaagctggacccaccagcatgtctcttcaagctaaaaactggctgcctggaccttgctacagacagcagcgtctgtcaaagcaggcaaacgacaacaacaacagcaactttccctggactgcggctacaaagtatcatctaaatggtcgggactcgttggttaatccaggaccagctatggccagccacaaagacgatgaagaaaagtttttccccatgcatggaaccctgatatttggtaaacaaggaacaaatgctaacgacgcggatttggaacatgtcatgattacagatgaagaagaaatcaggaccaccaatcccgtggctacagagcagtacggaaacgtgtcaaataatttgcaaaactcaaatactggtccaactacagaaaatgtcaatcaccagggagcgttacctggtatggtgtggcaggatcgagacgtgtacctgcagggacccatttgggccaagattcctcacaccgacggacactttcacccttctccactgatgggaggttttggactcaaacacccgcctcctcaaatcatgatcaaaaacactcctgttccagccaatcctcctacaaacttcagcgcggcaaagtttgcttccttcatcacacagtattccacgggacaggtcagcgtggagatcgagtgggagccgcagaaggagaacagcaaacgctggaaccccgagatccagtacacttccaactacaacaaatctgttaatgtggactttactgtggacactaatggtgtgtattcagagcctcgccccattggcaccagatacctgactcgtaatctgtaa

SEQ ID NO: 4476 - DNA, 2208 bp, Artificial Sequence
  Description of Artificial Sequence: Synthetic polynucleotide
atggctgccgatggttatcttccagattggctcgaggacactctctctgaaggaataagacagtggtggaagctcaaacctggcccaccaccaccaaagcccgcagagcggcatcaggacgacagcaggggtcttgtgcttcctgggtacaagtacctcggacccttcaacggactcgacaaaggagagccggtcaacgaggcagacgctgcggccctcgagcacgacaaggcctacgaccggcagctcgacagcggagacaacccgtacctcaagtacaaccacgccgacgcggagtttcaggagcgtcttaaagaagatacgtcttttgggggcaacctcggacgagcagtcttccaggcgaaaaagagggttcttgaacctctgggcctggttgaggaacctgttaagacggctccgggaaaaaagaggccggtagagcactctcctgcggagccagactcctcctcgggaaccggaaaagcgggccagcagcctgcaagaaagagattgaatttcggtcagactggagacgcagactccgtacctgacccccagcctctcggacagccaccagcagcccccacaagtttgggatctactacaatggctacaggcagtggcgcaccaatggcagacaataacgagggtgccgatggagtgggtaattcctcaggaaattggcattgcgattcccaatggctgggcgacagagtcatcaccaccagcacccgaacctgggccctgcccacctacaacaaccacctctacaagcaaatctccagccaatcaggagcatcgaacgacaaccactactttggctacagcaccccttgggggtattttgacttcaacagattccactgtcacttctccccacgtgactggcaaagactcatcaacaacaactggggattccgacccaagagacccaacttcaagctctttaacattcaagtcaaagaggtcacgcagaatgacggtacgacgacgattgccaataaccttaccagcacggttcaggtgtttactgactcggagtaccagctcccgtacgtcctcggctcggcgcatcaaggatgcctcccgccgtttccagcggacgtcttcatggtcccacagtatggatacctcaccctgaacaacgggagtcaggcggtaggacgctcttccttttactgcctggagtactttccttctcagatgctgcgtaccggaaacaactttaccttcagctacacctttgaggacgtgcctttccacagcagctacgctcacagccagagtttggaccggctgatgaatcctctgatcgaccagtatctgtattatctgaacaggacacaatcaaatagtggaactcttcagcagtctaggctactgtttagccaagctggacccaccagcatgtctcttcaagctaaaaactggctgcctggaccttgctacagacagcagcgtctgtcaaagcaggcaaacgacaacaacaacagcaactttccctggactgcggctacaaagtatcatctaaatggtcgggactcgttggttaatccaggaccagctatggccagccacaaagacgatgaagaaaagtttttccccatgcatggaaccctgatatttggtaaacaaggaacaaatgctaacgacgcggatttggaacatgtcatgattacagatgaagaagaaatcaggaccaccaatcccgtggctacagagcagtacggaaacgtgtcaaataatttgcaaaactcaaatactggtccaactacagaaaatgtcaatcaccagggagcgttacctggtatggtgtggcaggatcgagacgtgtacctgcagggacccatttgggccaagattcctcacaccgacggacactttcacccttctccactgatgggaggttttggactcaaacacccgcctcctcaaatcatgatcaaaaacactcctgttccagccaatcctcctacaaacttcagcgcggcaaagtttgcttccttcatcacacagtattccacgggacaggtcagcgtggagatcgagtgggagctgcagaaggagaacagcaaacgctggaaccccgagatccagtacacttccaactacaacaaatctgttaatgtggactttactgtggacactaatggtgtgtattcagagcctcgccccattggcaccagatacctgactcgtaatctgtaa

SEQ ID NO: 4477 - DNA, 2208 bp, Artificial Sequence
  Description of Artificial Sequence: Synthetic polynucleotide
atggctgccgatggttatcttccagattggctcgaggacactctctctgaaggaataagacagtggtggaagctcaaacctggcccaccaccaccaaagcccgcagagcggcatcaggacgacagcaggggtcttgtgcttcctgggtacaagtacctcggacccttcaacggactcgacaaaggagagccggtcaacgaggcagacgctgcggccctcgagcacgacaaggcctacgaccggcagctcgacagcggagacaacccgtacctcaagtacaaccacgccgacgcggagtttcaggagcgtcttaaagaagatacgtcttttgggggcaacctcggacgagcagtcttccaggcgaaaaagagggttcttgaacctctgggcctggttgaggaacctgttaagacggctccgggaaaaaagaggccggtagagcactctcctgcggagccagactcctcctcgggaaccggaaaagcgggccagcagcctgcaagaaagagattgaatttcggtcagactggagacgcagactccgtacctgacccccagcctctcggacagccaccagcagcccccacaagtttgggatctactacaatggctacaggcagtggcgcaccaatggcagacaataacgagggtgccgatggagtgggtaattcctcaggaaattggcattgcgattcccaatggctgggcgacagagtcatcaccaccagcacccgaacctgggccctgcccacctacaacaaccacctctacaagcaaatctccagccaatcaggagcatcgaacgacaaccactactttggctacagcaccccttgggggtattttgacttcaacagattccactgtcacttctccccacgtgactggcaaagactcatcaacaacaactggggattccgacccaagagactcaacttcaagctctttaacattcaagtcaaagaggtcacgcagaatgacggtacgacgacgattgccaataaccttaccagcacggttcaggtgtttactgactcggagtaccagctcccgtacgtcctcggctcggcgcatcaaggatgcctcccgccgtttccagcggacgtcttcatggtcccacagtatggatacctcaccctgaacaacgggagtcaggcggtaggacgctcttccttttactgcctggagtactttccttctcagatgctgcgtaccggaaacaactttaccttcagctacacctttgaggacgtgcctttccacagcagctacgctcacagccagagtttggaccggctgatgaatcctctgatcgaccagtatctgtattatctgaacaggacacaatcaaatagtggaactcttcagcagtctaggctactgtttagccaagctggacccaccagcatgtctcttcaagctaaaaactggctgcctggaccttgctacagacagcagcgtctgtcaaagcaggcaaacgacaacaacaacagcaactttccctggactgcggctacaaagtatcatctaaatggtcgggactcgttggttaatccaggaccagctatggccagccacaaagacgatgaagaaaagtttttccccatgcatggaaccctgatatttggtaaacaaggaacaaatgctaacgacgcggatttggaacatgtcgtgattacagatgaagaagaaatcaggaccaccaatcccgtggctacagagcagtacggaaacgtgtcaaataatttgcaaaactcaaatactggtccaactacagaaaatgtcaatcaccagggagcgttacctggtatggtgtggcaggatcgagacgtgtacctgcagggacccatttgggccaagattcctcacaccgacggacactttcacccttctccactgatgggaggttttggactcaaacacccgcctcctcaaatcatgatcaaaaacactcctgttccagccaatcctcctacaaacttcagcgcggcaaagtttgcttccttcatcacacagtattccacgggacaggtcagcgtggagatcgagtgggagctgcagaaggagaacagcaaacgctggaaccccgagatccagtacacttccaactacaacaaatctgttaatgtggactttactgtggacactaatggtgtgtattcagagcctcgccccattggcaccagatacctgactcgtaatctgtaa

SEQ ID NO: 4478 - DNA, 2208 bp, Artificial Sequence
  Description of Artificial Sequence: Synthetic polynucleotide
atggctgccgatggttatcttccagattggctcgaggacactctctctgaaggaataagacagtggtggaagctcaaacctggcccaccaccaccaaagcccgcagagcggcatcaggacgacagcaggggtcttgtgcttcctgggtacaagtacctcggacccttcaacggactcgacaaaggagagccggtcaacgaggcagacgctgcggccctcgagcacgacaaggcctacgaccggcagctcgacagcggagacaacccgtacctcaagtacaaccacgccgacgcggagtttcaggagcgtcttaaagaagatacgtcttttgggggcaacctcggacgagcagtcttccaggcgaaaaagagggttcttgaacctctgggcctggttgaggaacctgttaagacggctccgggaaaaaagaggccggtagagcactctcctgcggagccagactcctcctcgggaaccggaaaagcgggccagcagcctgcaagaaagagattgaatttcggtcagactggagacgcagactccgtacctgacccccagcctctcggacagccaccagcagcccccacaagtttgggatctactacaatggctacaggcagtggcgcaccaatggcagacaataacgagggtgccgatggagtgggtaattcctcaggaaattggcattgcgattcccaatggctgggcgacagagtcatcaccaccagcacccgaacctgggccctgcccacctacaacaaccacctctacaagcaaatctccagccaatcaggagcatcgaacgacaaccactactttggctacagcaccccttgggggtattttgacttcaacagattccactgtcacttctccccacgtgactggcaaagactcatcaacaacaactggggattccgacccaagagactcaacttcaagctctttaacattcaagtcaaagaggtcacgcagaatgacggtacgacgacgattgccaataaccttaccagcacggttcaggtgtttactgactcggagtaccagctcccgtacgtcctcggctcggcgcatcaaggatgcctcccgccgtttccagcggacgtcttcatggtcccacagtatggatacctcaccctgaacaacgggagtcaggcggtaggacgctcttccttttactgcctggagtactttccttctcagatgctgcgtaccggaaacaactttaccttcagctacacctttgaggacgtgcctttccacagcagctacgctcacagccagagtttggaccggctgatgaatcctctgatcgaccagtatctgtattatctgaacaggacacaatcaaatagtggaactcttcagcagtctaggctactgtttagccaagctggacccaccagcatgtctcttcaagctaaaaactggctgcctggaccttgctacagacagcagcgtctgtcaaagcaggcaaacgacaacaacaacagcaactttccctggactgcggctacaaagtatcatctaaatggtcgggactcgttggttaatccaggaccagctatggccagccacaaagacgatgaagaaaagtttttccccatgcatggaaccctgatatttggtaaacaaggaacaaatgctaacgacgcggatttggaacatgtcatgattacagatgaagaagaaatcaggaccaccaatcccgtggctacagagcagtacggaaacgtgtcaaataatttgcaaaactcaaatactggtccaactacagaaaatgtcaatcaccagggagcgttacctggtatggtgtggcgggatcgagacgtgtacctgcagggacccatttgggccaagattcctcacaccgacggacactttcacccttctccactgatgggaggttttggactcaaacacccgcctcctcaaatcatgatcaaaaacactcctgttccagccaatcctcctacaaacttcagcgcggcaaagtttgcttccttcatcacacagtattccacgggacaggtcagcgtggagatcgagtgggagctgcagaaggagaacagcaaacgctggaaccccgagatccagtacacttccaactacaacaaatctgttaatgtggactttactgtggacactaatggtgtgtattcagagcctcgccccattggcaccagatacctgactcgtaatctgtaa

SEQ ID NO: 4479 - DNA, 2208 bp, Artificial Sequence
  Description of Artificial Sequence: Synthetic polynucleotide
atggctgccgatggttatcttccagattggctcgaggacactctctctgaaggaataagacagtggtggaagctcaaacctggcccaccaccaccaaagcccgcagagcggcatcaggacgacagcaggggtcttgtgcttcctgggtacaagtacctcggacccttcaacggactcgacaaaggagagccggtcaacgaggcagacgctgcggccctcgagcacgacaaggcctacgaccggcagctcgacagcggagacaacccgtacctcaagtacaaccacgccgacgcggagtttcaggagcgtcttaaagaagatacgtcttttgggggcaacctcggacgagcagtcttccaggcgaaaaagagggttcttgaacctctgggcctggttgaggaacctgttaagacggctccgggaaaaaagaggccggtagagcactctcctgcggagccagactcctcctcgggaaccggaaaagcgggccagcagcctgcaagaaagagattgaatttcggtcagactggaggcgcagactccgtacctgacccccagcctctcggacagccaccagcagcccccacaagtttgggatctactacaatggctacaggcagtggcgcaccaatggcagacaataacgagggtgccgatggagtgggtaattcctcaggaaattggcattgcgattcccaatggctgggcgacagagtcatcaccaccagcacccgaacctgggccctgcccacctacaacaaccacctctacaagcaaatctccagccaatcaggagcatcgaacgacaaccactactttggctacagcaccccttgggggtattttgacttcaacagattccactgtcacttctccccacgtgactggcaaagactcatcaacaacaactggggattccgacccaagagactcaacttcaagctctttaacattcaagtcaaagaggtcacgcagaatgacggtacgacgacgattgccaataaccttaccagcacggttcaggtgtttactgactcggagtaccagctcccgtacgtcctcggctcggcgcatcaaggatgcctcccgccgtttccagcggacgtcttcatggtcccacagtatggatacctcaccctgaacaacgggagtcaggcggtaggacgctcttccttttactgcctggagtactttccttctcagatgctgcgtaccggaaacaactttaccttcagctacacctttgaggacgtgcctttccacagcagctacgctcacagccagagtttggaccggctgatgaatcctctgatcgaccagtatctgtattatctgaacaggacacaatcaaatagtggaactcttcagcagtctaggctactgtttagccaagctggacccaccagcatgtctcttcaagctaaaaactggctgcctggaccttgctacagacagcagcgtctgtcaaagcaggcaaacgacaacaacaacagcaactttccctggactgcggctacaaagtatcatctaaatggtcgggactcgttggttaatccaggaccagctatggccagccacaaagacgatgaagaaaagtttttccccatgcatggaaccctgatatttggtaaacaaggaacaaatgctaacgacgcggatttggaacatgtcatgattacagatgaagaagaaatcaggaccaccaatcccgtggctacagagcagtacggaaacgtgtcaaataatttgcaaaactcaaatactggtccaactacagaaaatgtcaatcaccagggagcgttacctggtatggtgtggcaggatcgagacgtgtacctgcagggacccatttgggccaagattcctcacaccgacggacactttcacccttctccactgatgggaggttttggactcaaacacccgcctcctcaaatcatgatcaaaaacactcctgttccagccaatcctcctacaaacttcagcgcggcaaagtttgcttccttcatcacacagtattccacgggacaggtcagcgtggagatcgagtgggagctgcagaaggagaacagcaaacgctggaaccccgagatccagtacacttccaactacaacaaatctgttaatgtggactttactgtggacactaatggtgtgtattcagagcctcgccccattggcaccagatacctgactcgtaatctgtaa

SEQ ID NO: 4480 - DNA, 2208 bp, Artificial Sequence
  Description of Artificial Sequence: Synthetic polynucleotide
atggctgccgatggttatcttccagattggctcgaggacactctctctgaaggaataagacagtggtggaagctcaaacctggcccaccaccaccaaagcccgcagagcggcatcaggacgacagcaggggtcttgtgcttcctgggtacaagtacctcggacccttcaacggactcgacaaaggagagccggtcaacgaggcagacgctgcggccctcgagcacgacaaggcctacgaccggcagctcgacagcggagacaacccgtacctcaagtacaaccacgccgacgcggagtttcaggagcgtcttaaagaagatacgtcttttgggggcaacctcggacgagcagtcttccaggcgaaaaagagggttcttgaacctctgggcctggttgaggaacctgttaagacggctccgggaaaaaagaggccggtagagcactctcctgcggagccagactcctcctcgggaaccggaaaagcgggccagcagcctgcaagaaagagattgaatttcggtcagactggagacgcagactccgtacctgacccccagcctctcggacagccaccagcagcccccacaagtttgggatctactacaatggctacaggcagtggcgcaccaatggcagacaataacgagggtaccgatggagtgggtaattcctcaggaaattggcattgcgattcccaatggctgggcgacagagtcatcaccaccagcacccgaacctgggccctgcccacctacaacaaccacctctacaagcaaatctccagccaatcaggagcatcgaacgacaaccactactttggctacagcaccccttgggggtattttgacttcaacagattccactgtcacttctccccacgtgactggcaaagactcatcaacaacaactggggattccgacccaagagactcaacttcaagctctttaacattcaagtcaaagaggtcacgcagaatgacggtacgacgacgattgccaataaccttaccagcacggttcaggtgtttactgactcggagtaccagctcccgtacgtcctcggctcggcgcatcaaggatgcctcccgccgtttccagcggacgtcttcatggtcccacagtatggatacctcaccctgaacaacgggagtcaggcggtaggacgctcttccttttactgcctggagtactttccttctcagatgctgcgtaccggaaacaactttaccttcagctacacctttgaggacgtgcctttccacagcagctacgctcacagccagagtttggaccggctgatgaatcctctgatcgaccagtatctgtattatctgaacaggacacaatcaaatagtggaactcttcagcagtctaggctactgtttagccaagctggacccaccagcatgtctcttcaagctaaaaactggctgcctggaccttgctacagacagcagcgtctgtcaaagcaggcaaacgacaacaacaacagcaactttccctggactgcggctacaaagtatcatctaaatggtcgggactcgttggttaatccaggaccagctatggccagccacaaagacgatgaagaaaagtttttccccatgcatggaaccctgatatttggtaaacaaggaacaaatgctaacgacgcggatttggaacatgtcatgattacagatgaagaagaaatcaggaccaccaatcccgtggctacagagcagtacggaaacgtgtcaaataatttgcaaaactcaaatactggtccaactacagaaaatgtcaatcaccagggagcgttacctggtatggtgtggcaggatcgagacgtgtacctgcagggacccatttgggccaagattcctcacaccgacggacactttcacccttctccactgatgggaggttttggactcaaacacccgcctcctcaaatcatgatcaaaaacactcctgttccagccaatcctcctacaaacttcagcgcggcaaagtttgcttccttcatcacacagtattccacgggacaggtcagcgtggagatcgagtgggagctgcagaaggagaacagcaaacgctggaaccccgagatccagtacacttccaactacaacaaatctgttaatgtggactttactgtggacactaatggtgtgtattcagagcctcgccccattggcaccagatacctgactcgtaatctgtaa

SEQ ID NO: 4481 - DNA, 2208 bp, Artificial Sequence
  Description of Artificial Sequence: Synthetic polynucleotide
atggctgccgatggttatcttccagattggctcgaggacactctctctgaaggaataagacagtggtggaagctcaaacctggcccaccaccaccaaagcccgcagagcggcatcaggacgacagcaggggtcttgtgcttcctgggtacaagtacctcggacccttcaacggactcgacaaaggagagccggtcaacgaggcagacgctgcggccctcgagcacgacaaggcctacgaccggcagctcgacagcggagacaacccgtaccccaagtacaaccacgccgacgcggagtttcaggagcgtcttaaagaagatacgtcttttgggggcaacctcggacgagcagtcttccaggcgaaaaagagggttcttgaacctctgggcctggttgaggaacctgttaagacggctccgggaaaaaagaggccggtagagcactctcctgcggagccagactcctcctcgggaaccggaaaagcgggccagcagcctgcaagaaagagattgaatttcggtcagactggagacgcagactccgtacctgacccccagcctctcggacagccaccagcagcccccacaagtttgggatctactacaatggctacaggcagtggcgcaccaatggcagacaataacgagggtgccgatggagtgggtaattcctcaggaaattggcattgcgattcccaatggctgggcgacagagtcatcaccaccagcacccgaacctgggccctgcccacctacaacaaccacctctacaagcaaatctccagccaatcaggagcatcgaacgacaaccactactttggctacagcaccccttgggggtattttgacttcaacagattccactgtcacttctccccacgtgactggcaaagactcatcaacaacaactggggattccgacccaagagactcaacttcaagctctttaacattcaagtcaaagaggtcacgcagaatgacggtacgacgacgattgccaataaccttaccagcacggttcaggtgtttactgactcggagtaccagctcccgtacgtcctcggctcggcgcatcaaggatgcctcccgccgtttccagcggacgtcttcatggtcccacagtatggatacctcaccctgaacaacgggagtcaggcggtaggacgctcttccttttactgcctggagtactttccttctcagatgctgcgtaccggaaacaactttaccttcagctacacctttgaggacgtgcctttccacagcagctacgctcacagccagagtttggaccggctgatgaatcctctgatcgaccagtatctgtattatctgaacaggacacaatcaaatagtggaactcttcagcagtctaggctactgtttagccaagctggacccaccagcatgtctcttcaagctaaaaactggctgcctggaccttgctacagacagcagcgtctgtcaaagcaggcaaacgacaacaacaacagcaactttccctggactgcggctacaaagtatcatctaaatggtcgggactcgttggttaatccaggaccagctatggccagccacaaagacgatgaagaaaagtttttccccatgcatggaaccctgatatttggtaaacaaggaacaaatgctaacgacgcggatttggaacatgtcatgattacagatgaagaagaaatcaggaccaccaatcccgtggctacagagcagtacggaaacgtgtcaaataatttgcaaaactcaaatactggtccaactacagaaaatgtcaatcaccagggagcgttacctggtatggtgtggcaggatcgagacgtgtacctgcagggacccatttgggccaagattcctcacaccgacggacactttcacccttctccactgatgggaggttttggactcaaacacccgcctcctcaaatcatgatcaaaaacactcctgttccagccaatcctcctacaaacttcagcgcggcaaagtttgcttccttcatcacacagtattccacgggacaggtcagcgtggagatcgagtgggagctgcagaaggagaacagcaaacgctggaaccccgagatccagtacacttccaactacaacaaatctgttaatgtggactttactgtggacactaatggtgtgtattcagagcctcgccccattggcaccagatacctgactcgtaatctgtaa

SEQ ID NO: 4482 - DNA, 2208 bp, Artificial Sequence
  Description of Artificial Sequence: Synthetic polynucleotide
atggctgccgatggttatcttccagattggctcgaggacactctctctgaaggaataagacagtggtggaagctcaaacctggcccaccaccaccaaagcccgcagagcggcatcaggacgacagcaggggtcttgtgcttcctgggtacaagtacctcggacccttcaacggactcgacaaaggagagccggtcaacgaggcagacgctgcggccctcgagcacgacaaggcctacgaccggcagctcgacagcggagacaacccgtacctcaagtacaaccacgccgacgcggagtttcaggagcgtcttaaagaagatacgtcttttgggggcaacctcggacgagcagtcttccaggcgaaaaagagggttcttgaacctctgggcctggttgaggaacctgttaagacggctccgggaaaaaagaggccggtagagcactctcctgcggagccagactcctcctcgggaaccggaaaagcgggccagcagcctgcaagaaagagattgaatttcggtcagactggagacgcagactccgtacctgacccccagcctctcggacagccaccagcagcccccacaagtttgggatctactacaatggctacaggcagtggcgcaccaatggcagacaataacgagggtgccgatggagtgggtaattcctcaggaaattggcattgcgattcccaatggctgggcgacagagtcatcaccaccagcacccgaacctgggccctgcccacctacaacaaccacctctacaagcaaatctccagccaatcaggagcatcgaacgacaaccactactttggctacagcaccccttgggggtattttgacttcaacagattccactgtcacttctccccacgtgactggcaaagactcatcaacaacaactggggattccgacccaagagactcaacttcaagctctttaacattcaagtcaaagaggtcacgcagaatgacggtacgacgacgattgccaataaccttaccagcacggttcaggtgtttactgactcggagtaccagctcccgtacgtcctcggctcggcgcatcaaggatgcctcccgccgtttccagcggacgtcttcatggtcccacagtatggatacctcaccctgaacaacgggagtcaggcggtaggacgctcttccttttactgcctggagtactttccttctcagatgctgcgtaccggaaacaactttaccttcagctacacctttgaggacgtgcctttccacagcagctacgctcacagccagagtttggaccggctgatgaatcctctgatcgaccagtatctgtattatctgaacaggacacaatcaaatagtggaactcttcagcagtctaggctactgtttagccaagctggacccaccagcatgtctcttcaagctaaaaactggctgcctggaccttgctacagacagcagcgtctgtcaaagcaggcaaacgacaacaacaacagcaactttccctggactgcggctacaaagtatcatctaaatggtcgggactcgttggttaatccaggaccagctatggccagccacaaagacgatgaagaaaagtttttccccatgcatggaaccctgatatttggtaaacaaggaacaaatgctaacgacgcggatttggaacatgtcatgattacagatgaagaagaaatcagggccaccaatcccgtggctacagagcagtacggaaacgtgtcaaataatttgcaaaactcaaatactggtccaactacagaaaatgtcaatcaccagggagcgttacctggtatggtgtggcaggatcgagacgtgtacctgcagggacccatttgggccaagattcctcacaccgacggacactttcacccttctccactgatgggaggttttggactcaaacacccgcctcctcaaatcatgatcaaaaacactcctgttccagccaatcctcctacaaacttcagcgcggcaaagtttgcttccttcatcacacagtattccacgggacaggtcagcgtggagatcgagtgggagctgcagaaggagaacagcaaacgctggaaccccgagatccagtacacttccaactacaacaaatctgttaatgtggactttactgtggacactaatggtgtgtattcagagcctcgccccattggcaccagatacctgactcgtaatctgtaa

SEQ ID NO: 4483 - DNA, 2208 bp, Artificial Sequence
  Description of Artificial Sequence: Synthetic polynucleotide
atggctgccgatggttatcttccagattggctcgaggacactctctctgaaggaataagacagtggtggaagctcaaacctggcccaccaccaccaaagcccgcagagcggcatcaggacgacagcaggggtcttgtgcttcctgggtacaagtacctcggacccttcaacggactcgacaaaggagagccggtcaacgaggcagacgctgcggccctcgagcacgacaaggcctacgaccggcagctcgacagcggagacaacccgtacctcaagtacaaccacgccgacgcggagtttcaggagcgtcttaaagaagatacgtcttttgggggcaacctcggacgagcagtcttccaggcgaaaaagagggttcttgaacctctgggcctggttgaggaacctgttaagacggctccgggaaaaaagaggccggtagagcactctcctgcggagccagactcctcctcgggaaccggaaaagcgggccagcagcctgcaagaaagagattgaatttcggtcagactggagacgcagactccgtacctgacccccagcctctcggacagccaccagcagcccccacaagtttgggatctactacaatggctacaggcagtggcgcaccaatggcagacaataacgagggtgccgatggagtgggtaattcctcaggaaattggcattgcgattcccaatggctgggcgacagagtcatcaccaccagcacccgaacctgggccctgcccacctacaacaaccacctctacaagcaaatctccagccaatcaggagcatcgaacgacaaccactactttggctacagcaccccttgggggtattttgacttcaacagattccactgtcgcttctccccacgtgactggcaaagactcatcaacaacaactggggattccgacccaagagactcaacttcaagctctttaacattcaagtcaaagaggtcacgcagaatgacggtacgacgacgattgccaataaccttaccagcacggttcaggtgtttactgactcggagtaccagctcccgtacgtcctcggctcggcgcatcaaggatgcctcccgccgtttccagcggacgtcttcatggtcccacagtatggatacctcaccctgaacaacgggagtcaggcggtaggacgctcttccttttactgcctggagtactttccttctcagatgctgcgtaccggaaacaactttaccttcagctacacctttgaggacgtgcctttccacagcagctacgctcacagccagagtttggaccggctgatgaatcctctgatcgaccagtatctgtattatctgaacaggacacaatcaaatagtggaactcttcagcagtctaggctactgtttagccaagctggacccaccagcatgtctcttcaagctaaaaactggctgcctggaccttgctacagacagcagcgtctgtcaaagcaggcaaacgacaacaacaacagcaactttccctggactgcggctacaaagtatcatctaaatggtcgggactcgttggttaatccaggaccagctatggccagccacaaagacgatgaagaaaagtttttccccatgcatggaaccctgatatttggtaaacaaggaacgaatgctaacgacgcggatttggaacatgtcatgattacagatgaagaagaaatcaggaccaccaatcccgtggctacagagcagtacggaaacgtgtcaaataatttgcaaaactcaaatactggtccaactacagaaaatgtcaatcaccagggagcgttacctggtatggtgtggcaggatcgagacgtgtacctgcagggacccatttgggccaagattcctcacaccgacggacactttcacccttctccactgatgggaggttttggactcaaacacccgcctcctcaaatcatgatcaaaaacactcctgttccagccaatcctcctacaaacttcagcgcggcaaagtttgcttccttcatcacacagtattccacgggacaggtcagcgtggagatcgagtgggagctgcagaaggagaacagcaaacgctggaaccccgagatccagtacacttccaactacaacaaatctgttaatgtggactttactgtggacactaatggtgtgtattcagagcctcgccccattggcaccagatacctgactcgtaatctgtaa

SEQ ID NO: 4484 - DNA, 2208 bp, Artificial Sequence
  Description of Artificial Sequence: Synthetic polynucleotide
atggctgccgatggttatcttccagattggctcgaggacactctctctgaaggaataagacagtggtggaagctcaaacctggcccaccaccaccaaagcccgcagagcggcatcaggacgacagcaggggtcttgtgcttcctgggtacaagtacctcggacccttcaacggactcgacaaaggagagccggtcaacgaggcagacgctgcggccctcgagcacgacaaggcctacgaccggcagctcgacagcggagacaacccgtacctcaagtacaaccacgccgacgcggagtttcaggagcgtcttaaagaagatacgtcttttgggggcaacctcggacgagcagtcttccaggcgaaaaagagggttcttgaacctctgggcctggttgaggaacctgttaagacggctccgggaaaaaagaggccggtagagcactctcctgcggagccagactcctcctcgggaaccggaaaagcgggccagcagcctgcaagaaagagattgaatttcggtcagactggagacgcagactccgtacctgacccccagcctctcggacagccaccagcagcccccacaagtttgggatctactacaatggctacaggcagtggcgcaccaatggcagacaataacgagggtgccgatggagtgggtaattcctcaggaaattggcattgcgattcccaatggctgggcgacagagtcatcaccaccagcacccgaacctgggccctgcccacctacaacaaccacctctacaagcaaatctccagccaatcaggagcatcgaacgacaaccactactttggctacagcaccccttgggggtattttgacttcaacagattccactgtcacttctccccacgtgactggcaaagactcatcaacaacaactggggattccgacccaagagactcaacttcaagctctttaacattcaagtcaaagaggtcacgcagaatgacggtacgacgacgattgccaataaccttaccagcacggttcaggtgtttactgactcggagtaccagctcccgtacgtcctcggctcggcgcatcaaggatgcctcccgccgtttccagcggacgtcttcatggtcccacagtatggatacctcaccctgaacaacgggagtcaggcggtaggacgctcttccttttactgcctggagtactttccttctcagatgctgcgtaccggaaacaactttaccttcagctacacctttgaggacgtgcctttccgcagcagctacgctcacagccagagtttggaccggctgatgaatcctctgatcgaccagtatctgtattatctgaacaggacacaatcaaatagtggaactcttcagcagtctaggctactgtttagccaagctggacccaccagcatgtctcttcaagctaaaaactggctgcctggaccttgctacagacagcagcgtctgtcaaagcaggcaaacgacaacaacaacagcaactttccctggactgcggctacaaagtatcatctaaatggtcgggactcgttggttaatccaggaccagctatggccagccacaaagacgatgaagaaaagtttttccccatgcatggaaccctgatatttggtaaacaaggaacaaatgctaacgacgcggatttggaacatgtcatgattacagatgaagaagaaatcaggaccaccaatcccgtggctacagagcagtacggaaacgtgtcaaataatttgcaaaactcaaatactggtccaactacagaaaatgtcaatcaccagggagcgttacctggtatggtgtggcaggatcgagacgtgtacctgcagggacccatttgggccaagattcctcacaccgacggacactttcacccttctccactgatgggaggttttggactcaaacacccgcctcctcaaatcatgatcaaaaacactcctgttccagccaatcctcctacaaacttcagcgcggcaaagtttgcttccttcatcacacagtattccacgggacaggtcagcgtggagatcgagtgggagctgcagaaggagaacagcaaacgctggaaccccgagatccagtacacttccaactacaacaaatctgttaatgtggactttactgtggacactaatggtgtgtattcagagcctcgccccattggcaccagatacctgactcgtaatctgtaa

SEQ ID NO: 4485 - DNA, 2208 bp, Artificial Sequence
  Description of Artificial Sequence: Synthetic polynucleotide
atggctgccgatggttatcttccagattggctcgaggacactctctctgaaggaataagacagtggtggaagctcaaacctggcccaccaccaccaaagcccgcagagcggcatcaggacgacagcaggggtcttgtgcttcctgggtacaagtacctcggacccttcaacggactcgacaaaggagagccggtcaacgaggcagacgctgcggccctcgagcacgacaaggcctacgaccggcagctcgacagcggagacaacccgtacctcaagtacaaccacgccgacgcggagtttcaggagcgtcttaaagaagatacgtcttttgggggcaacctcggacgagcagtcttccaggcgaaaaagagggttcttgaacctctgggcctggttgaggaacctgttaagacggctccgggaaaaaagaggccggtagagcactctcctgcggagccagactcctcctcgggaaccggaaaagcgggccagcagcctgcaagaaagagattgaatttcggtcagactggagacgcagactccgtacctgacccccagcctctcggacagccaccagcagcccccacaagtttgggatctactacaatggctacaggcagtggcgcaccaatggcagacaataacgagggtgccgatggagtgggtaattcctcaggaaattggcattgcgattcccaatggctgggcgacagagtcatcaccaccagcacccgaacctgggccctgcccacctacagcaaccacctctacaagcaaatctccagccaatcaggagcatcgaacgacaaccactactttggctacagcaccccttgggggtattttgacttcaacagattccactgtcacttctccccacgtgactggcaaagactcatcaacaacaactggggattccgacccaagagactcaacttcaagctctttaacattcaagtcaaagaggtcacgcagaatgacggtacgacgacgattgccaataaccttaccagcacggttcaggtgtttactgactcggagtaccagctcccgtacgtcctcggctcggcgcatcaaggatgcctcccgccgtttccagcggacgtcttcatggtcccacagtatggatacctcaccctgaacaacgggagtcaggcggtaggacgctcttccttttactgcctggagtactttccttctcagatgctgcgtaccggaaacaactttaccttcagctacacctttgaggacgtgcctttccacagcagctacgctcacagccagagtttggaccggctgatgaatcctctgatcgaccagtatctgtattatctgaacaggacacaatcaaatagtggaactcttcagcagtctaggctactgtttagccaagctggacccaccagcatgtctcttcaagctaaaaactggctgcctggaccttgctacagacagcagcgtctgtcaaagcaggcaaacgacaacaacaacagcaactttccctggactgcggctacaaagtatcatctaaatggtcgggactcgttggttaatccaggaccagctatggccagccacaaagacgatgaagaaaagtttttccccatgcatggaaccctgatatttggtaaacaaggaacaaatgctaacgacgcggatttggaacatgtcatgattacagatgaagaagaaatcaggaccaccaatcccgtggctacagagcagtacggaaacgtgtcaaataatttgcaaaactcaaatactggtccaactacagaaaatgtcaatcaccagggagcgttacctggtatggtgtggcaggatcgagacgtgtacctgcagggacccatttgggccaagattcctcacaccgacggacactttcacccttctccactgatgggaggttttggactcaaacacccgcctcctcaaatcatgatcaaaaacactcctgttccagccaatcctcctacaaacttcagcgcggcaaagtttgcttccttcatcacacagtattccacgggacaggtcagcgtggagatcgagtgggagctgcagaaggagaacagcaaacgctggaaccccgagatccagtacacttccaactacaacaaatctgttaatgtggactttactgtggacactaatggtgtgtattcagagcctcgccccattggcaccagatacctgactcgtaatctgtaa

SEQ ID NO: 4486 - DNA, 2208 bp, Artificial Sequence
  Description of Artificial Sequence: Synthetic polynucleotide
atggctgccgatggttatcttccagattggctcgaggacactctctctgaaggaataagacagtggtggaagctcaaacctggcccaccaccaccaaagcccgcagagcggcatcaggacgacagcaggggtcttgtgcttcctgggtacaagtacctcggacccttcaacggactcgacaaaggagagccggtcaacgaggcagacgctgcggccctcgagcacgacaaggcctacgaccggcagctcgacagcggagacaacccgtacctcaagtacaaccacgccgacgcggagtttcaggagcgtcttaaagaagatacgtcttttgggggcaacctcggacgagcagtcttccaggcgaaaaagagggttcttgaacctctgggcctggttgaggaacctgttaagacggctccgggaaaaaagaggccggtagagcactctcctgcggagccagactcctcctcgggaaccggaaaagcgggccagcagcctgcaagaaagagattgaatttcggtcagactggagacgcagactccgtacctgacccccagcctctcggacagccaccagcagcccccacaagtttgggatctactacaatggctacaggcagtggcgcaccaatggcagacaataacgagggtgccgatggagtgggtaattcctcaggaaattggcattgcgattcccaatggctgggcgacagagtcatcaccaccagcacccgaacctgggccctgcccacctacaacaaccacctctacaagcaaatctccagccaatcaggagcatcgaacgacaaccactactttggctacagcaccccttgggggtattttgacttcaacagattccactgtcacttctccccacgtgactggcaaagactcatcaacaacaactggggattccgacccaagagactcaacttcaagccctttaacattcaagtcaaagaggtcacgcagaatgacggtacgacgacgattgccaataaccttaccagcacggttcaggtgtttactgactcggagtaccagctcccgtacgtcctcggctcggcgcatcaaggatgcctcccgccgtttccagcggacgtcttcatggtcccacagtatggatacctcaccctgaacaacgggagtcaggcggtaggacgctcttccttttactgcctggagtactttccttctcagatgctgcgtaccggaaacaactttaccttcagctacacctttgaggacgtgcctttccacagcagctacgctcacagccagagtttggaccggctgatgaatcctctgatcgaccagtatctgtattatctgaacaggacacaatcaaatagtggaactcttcagcagtctaggctactgtttagccaagctggacccaccagcatgtctcttcaagctaaaaactggctgcctggaccttgctacagacagcagcgtctgtcaaagcaggcaaacgacaacaacaacagcaactttccctggactgcggctacaaagtatcatctaaatggtcgggactcgttggttaatccaggaccagctatggccagccacaaagacgatgaagaaaagtttttccccatgcatggaaccctgatatttggtaaacaaggaacaaatgctaacgacgcggatttggaacatgtcatgattacagatgaagaagaaatcaggaccaccaatcccgtggctacagagcagtacggaaacgtgtcaaataatttgcaaaactcaaatactggtccaactacagaaaatgtcaatcaccagggagcgttacctggtatggtgtggcaggatcgagacgtgtacctgcagggacccatttgggccaagattcctcacaccgacggacactttcacccttctccactgatgggaggttttggactcaaacacccgcctcctcaaatcatgatcaaaaacactcctgttccagccaatcctcctacaaacttcagcgcggcaaagtttgcttccttcatcacacagtattccacgggacaggtcagcgtggagatcgagtgggagctgcagaaggagaacagcaaacgctggaaccccgagatccagtacacttccaactacaacaaatctgttaatgtggactttactgtggacactaatggtgtgtattcagagcctcgccccattggcaccagatacctgactcgtaatctgtaa

SEQ ID NO: 4487 - DNA, 2208 bp, Artificial Sequence
  Description of Artificial Sequence: Synthetic polynucleotide
atggctgccgatggttatcttccagattggctcgaggacactctctctgaaggaataagacagtggtggaagctcaaacctggcccaccaccaccaaagcccgcagagcggcatcaggacgacagcaggggtcttgtgcttcctgggtacaagtacctcggacccttcaacggactcgacaaaggagagccggtcaacgaggcagacgctgcggccctcgagcacgacaaggcctacgaccggcagctcgacagcggagacaacccgtacctcaagtacaaccacgccgacgcggagtttcaggagcgtcttaaagaagatacgtcttttgggggcaacctcggacgagcagtcttccaggcgaaaaagagggttcttgaacctctgggcctggttgaggaacctgttaagacggctccgggaaaaaagaggccggtagagcactctcctgcggagccagactcctcctcgggaaccggaaaagcgggccagcagcctgcaagaaagagattgaatttcggtcagactggagacgcagactccgtacctgacccccagcctctcggacagccaccagcagcccccacaagtttgggatctactacaatggctacaggcagtggcgcaccaatggcagacaataacgagggtgccgatggagtgggtaattcctcaggaaattggcattgcgattcccaatggctgggcgacagagtcatcaccaccagcacccgaacctgggccctgcccacctacaacaaccacctctacaagcaaatctccagccaatcaggagcatcgaacggcaaccactactttggctacagcaccccttgggggtattttgacttcaacagattccactgtcacttctccccacgtgactggcaaagactcatcaacaacaactggggattccgacccaagagactcaacttcaagctctttaacattcaagtcaaagaggtcacgcagaatgacggtacgacgacgattgccaataaccttaccagcacggttcaggtgtttactgactcggagtaccagctcccgtacgtcctcggctcggcgcatcaaggatgcctcccgccgtttccagcggacgtcttcatggtcccacagtatggatacctcaccctgaacaacgggagtcaggcggtaggacgctcttccttttactgcctggagtactttccttctcagatgctgcgtaccggaaacaactttaccttcagctacacctttgaggacgtgcctttccacagcagctacgctcacagccagagtttggaccggctgatgaatcctctgatcgaccagtatctgtattatctgaacaggacacaatcaaatagtggaactcttcagcagtctaggctactgtttagccaagctggacccaccagcatgtctcttcaagctaaaaactggctgcctggaccttgctacagacagcagcgtctgtcaaagcaggcaaacgacaacaacaacagcaactttccctggactgcggctacaaagtatcatctaaatggtcgggactcgttggttaatccaggaccagctatggccagccacaaagacgatgaagaaaagtttttccccatgcatggaaccctgatatttggtaaacaaggaacaaatgctaacgacgcggatttggaacatgtcatgattacagatgaagaagaaatcaggaccaccaatcccgtggctacagagcagtacggaaacgtgtcaaataatttgcaaaactcaaatactggtccaactacagaaaatgtcaatcaccagggagcgttacctggtatggtgtggcaggatcgagacgtgtacctgcagggacccatttgggccaagattcctcacaccgacggacactttcacccttctccactgatgggaggttttggactcaaacacccgcctcctcaaatcatgatcaaaaacactcctgttccagccaatcctcctacaaacttcagcgcggcaaagtttgcttccttcatcacacagtattccacgggacaggtcagcgtggagatcgagtgggagctgcagaaggagaacagcaaacgctggaaccccgagatccagtacacttccaactacaacaaatctgttaatgtggactttactgtggacactaatggtgtgtattcagagcctcgccccattggcaccagatacctgactcgtaatctgtaa

SEQ ID NO: 4488 - DNA, 2208 bp, Artificial Sequence
  Description of Artificial Sequence: Synthetic polynucleotide
atggctgccgatggttatcttccagattggctcgaggacactctctctgaaggaataagacagtggtggaagctcaaacctggcccaccaccaccaaagcccgcagagcggcatcaggacgacagcaggggtcttgtgcttcctgggtacaagtacctcggacccttcaacggactcgacaaaggagagccggtcaacgaggcagacgctgcggccctcgagcacgacaaggcctacgaccggcagctcgacagcggagacaacccgtacctcaagtacaaccacgccgacgcggagtttcaggagcgtcttaaagaagatacgtcttttgggggcaacctcggacgagcagtcttccaggcgaaaaagagggttcttgaacctctgggcctggttgaggaacctgttaagacggctccgggaaaaaagaggccggtagagcactctcctgcggagccagactcctcctcgggaaccggaaaagcgggccagcagcctgcaagaaagagattgaatttcggtcagactggagacgcagactccgtacctgacccccagcctctcggacagccaccagcagcccccacaagtttgggatctactacaatggctacaggcagtggcgcaccaatggcagacaataacgagggtgccgatggagtgggtaattcctcaggaaattggcattgcgattcccaatggctgggcgacagagtcatcaccaccagcacccgaacctgggccctgcccacctacaacaaccacctctacaagcaaatctccagccaatcaggagcatcgaacgacaaccactactttggctacagcaccccttgggggtattttgacttcaacagattccactgtcacttctccccacgtgactggcaaagactcatcaacaacaactggggattccgacccaagagactcaacttcaagctctttaacattcaagtcaaagaggtcacgcagaatgacggtacgacgacgattgccaataaccttaccagcacggttcaggtgtttactgactcggagtaccagctcccgtacgtcctcggctcggcgcatcaaggatgcctcccgccgtttccagcggacgtcttcatggtcccacagtatggatacctcaccctgaacaacgggagtcaggcggtaggacgctcttccttttactgcctggagtactttccttctcagatgctgcgtaccggaaacaactttaccttcagctacacctttgaggacgtgcctttccacagcagctacgctcacagccagagtttggaccggctgatgaatcctctgatcgaccagtatctgtattatctgaacaggacacaatcaaatagtggaactcttcagcagtctaggctactgtttagccaagctggacccaccagcatgtctcttcaagctaaaaactggctgcctggaccttgctacagacagcagcgtctgtcaaagcaggcaaacgacaacaacaacagcaactttccctggactgcggctacaaagtatcatctaaatggtcgggactcgttggttaatccaggaccagctatggccagccacaaagacgatgaagaaaagtttttccccatgcatggaaccctgatatttggtaaacaaggaacaaatgctaacgacgcggatttggaacatgtcatgattacagatgaagaagaaatcaggaccgccaatcccgtggctacagagcagtacggaaacgtgtcaaataatttgcaaaactcaaatactggtccaactacagaaaatgtcaatcaccagggagcgttacctggtatggtgtggcaggatcgagacgtgtacctgcagggacccatttgggccaagattcctcacaccgacggacactttcacccttctccactgatgggaggttttggactcaaacacccgcctcctcaaatcatgatcaaaaacactcctgttccagccaatcctcctacaaacttcagcgcggcaaagtttgcttccttcatcacacagtattccacgggacaggtcagcgtggagatcgagtgggagctgcagaaggagaacagcaaacgctggaaccccgagatccagtacacttccaactacaacaaatctgttaatgtggactttactgtggacactaatggtgtgtattcagagcctcgccccattggcaccagatacctgactcgtaatctgtaa

SEQ ID NO: 4489 - DNA, 2208 bp, Artificial Sequence
  Description of Artificial Sequence: Synthetic polynucleotide
atggctgccgatggttatcttccagattggctcgaggacactctctctgaaggaataagacagtggtggaagctcaaacctggcccaccaccaccaaagcccgcagagcggcatcaggacgacagcaggggtcttgtgcttcctgggtacaagtacctcggacccttcaacggactcgacaaaggagagccggtcaacgaggcagacgctgcggccctcgagcacgacaaggcctacgaccggcagctcgacagcggagacaacccgtacctcaagtacaaccacgccgacgcggagtttcaggagcgtcttaaagaagatacgtcttttgggggcaacctcggacgagcagtcttccaggcgaaaaagagggttcttgaacctctgggcctggttgaggaacctgttaagacggctccgggaaaaaagaggccggtagagcactctcctgcggagccagactcctcctcgggaaccggaaaagcgggccagcagcctgcaagaaagagattgaatttcggtcagactggagacgcagactccgtacctgacccccagcctctcggacagccaccagcagcccccacaagtttgggatctactacaatggctacaggcagtggcgcaccaatggcagacaataacgagggtgccgatggagtgggtaattcctcaggaaattggcattgcgattcccaatggctgggcgacagagtcatcaccaccagcacccgaacctgggccctgcccacctacaacaaccacctctacaagcaaatctccagccaatcaggagcatcgaacgacaaccactactttggctacagcaccccttgggggtattttgacttcaacagattccactgtcacttctccccacgtgactggcaaagactcatcaacaacaactggggattccgacccaagagactcaacttcaagctctttaacattcaagtcaaagaggtcacgcagaatgacggtacgacgacgattgccaataaccttaccagcacggttcaggtgtttactgactcggagtaccagctcccgtacgtcctcggctcggcgcatcaaggatgcctcccgccgtttccagcggacgtcttcatggtcccacagtatggatacctcaccctgaacaacgggagtcaggcggtaggacgctcttccttttactgcctggagtactttccttctcagatgctgcgtaccggaaacaactttaccttcagctacacctttgagggcgtgcctttccacagcagctacgctcacagccagagtttggaccggctgatgaatcctctgatcgaccagtatctgtattatctgaacaggacacaatcaaatagtggaactcttcagcagtctaggctactgtttagccaagctggacccaccagcatgtctcttcaagctaaaaactggctgcctggaccttgctacagacagcagcgtctgtcaaagcaggcaaacgacaacaacaacagcaactttccctggactgcggctacaaagtatcatctaaatggtcgggactcgttggttaatccaggaccagctatggccagccacaaagacgatgaagaaaagtttttccccatgcatggaaccctgatatttggtaaacaaggaacaaatgctaacgacgcggatttggaacatgtcatgattacagatgaagaagaaatcaggaccaccaatcccgtggctacagagcagtacggaaacgtgtcaaataatttgcaaaactcaaatactggtccaactacagaaaatgtcaatcaccagggagcgttacctggtatggtgtggcaggatcgagacgtgtacctgcagggacccatttgggccaagattcctcacaccgacggacactttcacccttctccactgatgggaggttttggactcaaacacccgcctcctcaaatcatgatcaaaaacactcctgttccagccaatcctcctacaaacttcagcgcggcaaagtttgcttccttcatcacacagtattccacgggacaggtcagcgtggagatcgagtgggagctgcagaaggagaacagcaaacgctggaaccccgagatccagtacacttccaactacaacaaatctgttaatgtggactttactgtggacactaatggtgtgtattcagagcctcgccccattggcaccagatacctgactcgtaatctgtaa

SEQ ID NO: 4490 - DNA, 2208 bp, Artificial Sequence
  Description of Artificial Sequence: Synthetic polynucleotide
atggctgccgatggttatcttccagattggctcgaggacactctctctgaaggaataagacagtggtggaagctcaaacctggcccaccaccaccaaagcccgcagagcggcatcaggacgacagcaggggtcttgtgcttcctgggtacaagtacctcggacccttcaacggactcgacaaaggagagccggtcaacgaggcagacgctgcggccctcgagcacgacaaggcctacgaccggcagctcgacagcggagacaacccgtacctcaagtacaaccacgccgacgcggagtttcaggagcgtcttaaagaagatacgtcttttgggggcaacctcggacgagcagtcttccaggcgaaaaagagggttcttgaacctctgggcctggttgaggaacctgttaagacggctccgggaaaaaagaggccggtagagcactctcctgcggagccagactcctcctcgggaaccggaaaagcgggccagcagcctgcaagaaagagattgaatttcggtcagactggagacgcagactccgtacctgacccccagcctctcggacagccaccagcagcccccacaagtttgggatctactacaatggctacaggcagtggcgcaccaatggcagacaataacgagggtgccgatggagtgggtaattcctcaggaaattggcattgcgattcccaatggctgggcgacagagtcatcaccaccagcacccgaacctgggccctgcccacctacaacaaccacctctacaagcaaatctccagccaatcaggagcatcgaacgacaaccactactttggctacagcaccccttgggggtattttgacttcaacagattccactgtcacttctccccacgtgactggcaaagactcatcaacaacaactggggattccgacccaagagactcaacttcaagctctttaacattcaagtcaaagaggtcacgcagaatgacggtacgacgacgattgccaataaccttaccagcacggttcaggtgtttactgactcggagtaccagctcccgtacgtcctcggctcggcgcatcaaggatgcctcccgccgtttccagcggacgtcttcatggtcccacagtatggatacctcaccctgaacaacgggagtcaggcggtaggacgctcttccttttactgcctggagtactttccttctcagatgctgcgtaccggaaacaactttaccttcagctacacctttgaggacgtgcctttccacagcagctacgctcacagccagagtttggaccggctgatgaatcctctgatcgaccagtatctgtattatctgaacaggacacaatcaaatagtggaactcttcagcagtctaggctactgtttagccaagctggacccaccagcatgtctcttcaagctaaaaactggctgcctggaccttgctacagacagcagcgtctgtcaaagcaggcaaacgacaacaacaacagcaactttccctggactgcggctacaaagtatcatctaaatggtcgggactcgttggttaatccaggaccagctatggccagccacaaagacgatgaagaaaagtttttccccatgcatggaaccctgatatttggtaaacaaggaacaaatgctaacgacgcggatttggaacatgtcatgattacagatgaagaagaaatcaggaccaccaatcccgtggctacagagcagtacggaaacgtgtcaaataatttgcaaaactcaaatactggtccaactacagaaaatgtcaatcaccagggagcgttacctggtatggtgtggcaggatcgagacgtgtacctgcagggacccatttgggccaagattcctcacaccgacggacactttcacccttctccactgatgggaggttttggactcaaacacccgcctcctcaaatcatgatcaaaaacactcctgttccagccaatcctcctacaaacttcagcgcggcaaagtttgcttccttcatcacacagtattccacgggacaggtcagcgtggagatcgagtgggagctgcagaaggagaacagcaaacgctggaaccccgagatccagtacacttccaactacagcaaatctgttaatgtggactttactgtggacactaatggtgtgtattcagagcctcgccccattggcaccagatacctgactcgtaatctgtaa

SEQ ID NO: 4491 - DNA, 2208 bp, Artificial Sequence
  Description of Artificial Sequence: Synthetic polynucleotide
atggctgccgatggttatcttccagattggctcgaggacactctctctgaaggaataagacagtggtggaggctcaaacctggcccaccaccaccaaagcccgcagagcggcatcaggacgacagcaggggtcttgtgcttcctgggtacaagtacctcggacccttcaacggactcgacaaaggagagccggtcaacgaggcagacgctgcggccctcgagcacgacaaggcctacgaccggcagctcgacagcggagacaacccgtacctcaagtacaaccacgccgacgcggagtttcaggagcgtcttaaagaagatacgtcttttgggggcaacctcggacgagcagtcttccaggcgaaaaagagggttcttgaacctctgggcctggttgaggaacctgttaagacggctccgggaaaaaagaggccggtagagcactctcctgcggagccagactcctcctcgggaaccggaaaagcgggccagcagcctgcaagaaagagattgaatttcggtcagactggagacgcagactccgtacctgacccccagcctctcggacagccaccagcagcccccacaagtttgggatctactacaatggctacaggcagtggcgcaccaatggcagacaataacgagggtgccgatggagtgggtaattcctcaggaaattggcattgcgattcccaatggctgggcgacagagtcatcaccaccagcacccgaacctgggccctgcccacctacaacaaccacctctacaagcaaatctccagccaatcaggagcatcgaacgacaaccactactttggctacagcaccccttgggggtattttgacttcaacagattccactgtcacttctccccacgtgactggcaaagactcatcaacaacaactggggattccgacccaagagactcaacttcaagctctttaacattcaagtcaaagaggtcacgcagaatgacggtacgacgacgattgccaataaccttaccagcacggttcaggtgtttactgactcggagtaccagctcccgtacgtcctcggctcggcgcatcaaggatgcctcccgccgtttccagcggacgtcttcatggtcccacagtatggatacctcaccctgaacaacgggagtcaggcggtaggacgctcttccttttactgcctggagtactttccttctcagatgctgcgtaccggaaacaactttaccttcagctacacctttgaggacgtgcctttccacagcagctacgctcacagccagagtttggaccggctgatgaatcctctgatcgaccagtatctgtattatctgaacaggacacaatcaaatagtggaactcttcagcagtctaggctactgtttagccaagctggacccaccagcatgtctcttcaagctaaaaactggctgcctggaccttgctacagacagcagcgtctgtcaaagcaggcaaacgacaacaacaacagcaactttccctggactgcggctacaaagtatcatctaaatggtcgggactcgttggttaatccaggaccagctatggccagccacaaagacgatgaagaaaagtttttccccatgcatggaaccctgatatttggtaaacaaggaacaaatgctaacgacgcggatttggaacatgtcatgattacagatgaagaagaaatcaggaccaccaatcccgtggctacagagcagtacggaaacgtgtcaaataatttgcaaaactcaaatactggtccaactacagaaaatgtcaatcaccagggagcgttacctggtatggtgtggcaggatcgagacgtgtacctgcagggacccatttgggccaagattcctcacaccgacggacactttcacccttctccactgatgggaggttttggactcaaacacccgcctcctcaaatcatgatcaaaaacactcctgttccagccaatcctcctacaaacttcagcgcggcaaagtttgcttccttcatcacacagtattccacgggacaggtcagcgtggagatcgagtgggagctgcagaaggagaacagcaaacgctggaaccccgagatccagtacacttccaactacaacaaatctgttaatgtggactttactgtggacactaatggtgtgtattcagagcctcgccccattggcaccagatacctgactcgtaatctgtaa

SEQ ID NO: 4492 - DNA, 2208 bp, Artificial Sequence
  Description of Artificial Sequence: Synthetic polynucleotide
atggctgccgatggttatcttccagattggctcgaggacactctctctgaaggaataagacagtggtggaagctcaaacctggcccaccaccgccaaagcccgcagagcggcacaaggacgacagtaggggtcttgtgcttcctgggtacaagtacctcggacccttcaacggactcgacaaaggagagccggtcaacgaggcagacgccgcggccctcgagcacgacaaggcctacgaccggcagctcgacagcggagacaacccgtacctcaagtacaaccacgccgacgcggagtttcaggagcgtcttaaagaagatacgtcttttgggggcaacctcggacgagcagtattccaggcgaaaaagagggttcttgaacctctgggcctggttgaggagcctgttaagacggctccgggaaaaaagaggccggtagagcactctcctgtggagccagactcctcctcgggaaccggaaaagcgggccagcagcctgcaagaaaaagattgaattttggtcagactggagacgcagactccgtacctgacccccagcctctcggacagccaccagcagcccccacaagtttgggatctactacaatggctacaggcagtggcgcaccaatggcagacaataacgagggtgccgatggagtgggtaattcctcaggaaattggcattgcgattcccaatggctgggcgacagagtcatcaccaccagcacccgaacctgggccctgcccacctacaacaaccacctctacaagcaaatctccagccaatcaggagcatcgaacgacaaccactactttggccacagcaccccttgggggtattttgacttcaacagattccactgtcacttctccccacgtgactggcaaagactcatcaacaacaactggggattccgacccaagagactcaacttcaagctctttaacattcaagtcaaagaggtcacgcagaatgacggtacgacgacgattgccaataaccttaccagcacggttcaggtgtttactgactcggagtaccagctcccgtacgtcctcggctcggcgcatcaaggatgcctcccgccgttcccagcagacgtcttcatggtcccacagtatggatacctcaccctgaacaacgggagtcaggcggtaggacgctcttccttttactgcctggagtactttccttctcagatgcttcgtaccggaaacaactttaccttcagctacacctttgaagacgtgcctttccacagtagctacgctcacagccagagtctggatcggctgatgaatcctcttatcgaccagtacctgtattatctaaacaaaacacaatcaaatagtggaactcttcagcagtctcggctactgtttagtcaagctggacccaccagcatgtctcttcaagctaaaaactggctgcctggaccttgctacagacaacagcgtctgtcaaagcaggcaaacgacaacaacaacagcaactttccctggactgcggctacaaagtatcatctaaatggccgggactcgttggttaatccaggaccagctatggccagccacaaagacgatgaagaaaagtttttccccatgcatggaaccctgatatttggtaaacaaggaacaaatgctaacgacgcggatttggacaatgtcatgattacagatgaagaagaaatccgcaccaccaatcccgtggctacggagcagtacgggactgtgtcaaataatttgcaaaactcaaatactggtccaactactggaactgtcaatcaccaaggagcgttacctggtatggtgtggcaggatcgagacgtgtacctgcagggacccatttgggccaagattcctcacaccgatggacactttcatccttctccactgatgggaggttttggactcaaacacccgcctcctcagatcatgatcaaaaacactcccgttccagccaatcctcctacaaacttcagttctgccaagtctgcttccttcatcacacagtattccacgggacaagtcagcgtggagattgagtgggagctgcagaaggagaacagcaaacgctggaaccccgagatccagtacacttccaactacaacaaatctgttaatgtggactttactgtggacactaatggcgtgtattcagagcctcgccccattggcaccagatacctgactcgtaatctgtaa

SEQ ID NO: 4493 - DNA, 2208 bp, Artificial Sequence
  Description of Artificial Sequence: Synthetic polynucleotide
atggctgccgatggttatcttccagattggctcgaggacactctctctgaaggaataagacagtggtggaagctcaaacctggcccaccaccgccaaagcccgcagagcggcacaaggacgacagtaggggtcttgtgcttcctgggtacaagtacctcggacccttcaacggactcgacaaaggagagccggtcaacgaggcagacgccgcggccctcgagcacgacaaggcctacgaccggcagctcgacagcggagacaacccgtacctcaagtacaaccacgccgacgcggagtttcaggagcgtcttaaagaagatacgtcttttgggggcaacctcggacgagcagtcttccaggcgaaaaagagggttcttgaacctctgggcctggttgaggaacctgttaagacggctccgggaaaaaagaggccggtagagcactctcctgtggagccagactcctcctcgggaaccggaaaggcgggccagcagcctgcaagaaaaagattgaattttggtcagactggagacgcagactcagtacctgacccccagcctctcggacagccaccagcagccccctctggtctgggaactaatacgatggctacaggcagtggcgcaccaatggcagacaataacgagggcgccgacggagtgggtaattcctcgggaaattggcattgcgattccacatggatgggcgacagagtcatcaccaccagcacccgaacctgggccctgcccacctacaacaaccacctctacaaacaaatttccagccaatcaggagcctcgaacgacaatcactactttggctacagcaccccttgggggtattttgacttcaacagattccactgccacttttcaccacgtgactggcaaagactcatcaacaacaactggggattccgacccaagagactcaacttcaagctctttaacattcaagtcaaagaggtcacgcagaatgacggtacgacgacgattgccaataaccttaccagcacggttcaggtgtttactgactcggagtaccagctcccgtacgtcctcggctcggcgcatcaaggatgcctcccgccgttcccagcagacgtcttcatggtcccacagtatggatacctcaccctgaacaacgggagtcaggcggtaggacgctcttccttttactgcctggagtactttccttctcagatgcttcgtaccggaaacaactttaccttcagctacacctttgaagacgtgcctttccacagtagctacgctcacagccagagtctggatcggctgatgaatcctcttatcgaccagtacctgtattatctaaacaaaacacaatcaaatagtggaactcttcagcagtctcggctactgtttagtcaagctggacccaccagcatgtctcttcaagctaaaaactggctgcctggaccttgctacagacaacagcgtctgtcaaagcaggcaaacgacaacaacaacagcaactttccctggactgcggctacaaagtatcatctaaatggccgggactcgttggttaatccaggaccagctatggccagccacaaagacgatgaagaaaagtttttccccatgcatggaaccctgatatttggtaaacaaggaacaaatgctaacgacgcggatttggacaatgtcatgattacagatgaagaagaaatccgcaccaccaatcccgtggctacggagcagtacgggactgtgtcaaataatttgcaaaactcaaatactggtccaactactggaactgtcaatcaccaaggagcgttacctggtatggtgtggcaggatcgagacgtgtacctgcagggacccatttgggccaagattcctcacaccgatggacactttcatccttctccactgatgggaggttttggactcaaacacccgcctcctcagatcatgatcaaaaacactcccgttccagccaatcctcctacaaacttcagttctgccaagtttgcttccttcatcacacagtattccacgggacaagtcagcgtggagattgagtgggagctgcagaaggagaacagcaaacgctggaaccccgagatccagtacacttccaactacaacaaatctgttaatgtggactttactgtggacactaatggcgtgtattcagagcctcgccccattggcaccagatacctgactcgtaatctgtaa

SEQ ID NO: 4494 - DNA, 2208 bp, Artificial Sequence
  Description of Artificial Sequence: Synthetic polynucleotide
atggctgccgatggttatcttccagattggctcgaggacactctccctgaaggaataagacagtggtggaagctcaaacctggcccaccaccgccaaagcccgcagagcggcacaaggacgacagtaggggtcttgtgcttcctgggtacaagtacctcggacccttcaacggactcgacaaaggagagccggtcaacgaggcagacgccgcggccctcgagcacgacaaggcctacgaccggcagctcgacagcggagacaacccgtacctcaagtacaaccacgccgacgcggagtttcaggagcgtcttaaagaagatacgtcttttgggggcaacctcggacgagcagtattccaggcgaaaaagagggttcttgaacctctgggcctggttgaggagcctgttaagacggctccgggaaaaaagaggccggtagagcactctcctgtggagccagactcctcctcgggaaccggaaaagcgggccagcagcctgcaagaaaaagattgaattttggtcagactggagacgcagactccgtacctgacccccagcctctcggacagccaccagcagcccccacaagtttgggatctactacaatggctacaggcagtggcgcaccaatggcagacaataacgagggtgccgatggagtgggtaattcctcaggaaattggcattgcgattcccaatggctgggcgacagagtcatcaccaccagcacccgaacctgggccctgcccacctacaacaaccacctctacaagcaaatctccagccaatcaggagcatcgaacgacaaccactactttggccacagcaccccttgggggtattttgacttcaacagattccactgtcacttctccccacgtgactggcaaagactcatcaacaacaactggggattccgacccaagagactcaacttcaagctctttaacattcaagtcaaagaggtcacgcagaatgacggtacgacgacgattgccaataaccttaccagcacggttcaggtgtttactgactcggagtaccagctcccgtacgtcctcggctcggcgcatcaaggatgcctcccgccgttcccagcagacgtcttcatggtcccacagtatggatacctcaccctgaacaacgggagtcaggcggtaggacgctcttccttttactgcctggagtactttccttctcagatgcttcgtaccggaaacaactttaccttcagctacacctttgaagacgtgcctttccacagtagctacgctcacagccagagtctggatcggctgatgaatcctcttatcgaccagtacctgtattatctaaacaaaacacaatcaaatagtggaactcttcagcagtctcggctactgtttagtcaagctggacccaccagcatgtctcttcaagctaaaaactggctgcctggaccttgctacagacaacagcgtctgtcaaagcaggcaaacgacaacaacaacagcaactttccctggactgcggctacaaagtatcatctaaatggccgggactcgttggttaatccaggaccagctatggccagccacaaagacgatgaagaaaagtttttccccatgcatggaaccctgatatttggtaaacaaggaacaaatgctaacgacgcggatttggacaatgtcatgattacagatgaagaagaaatccgcaccaccaatcccgtggctacggagcagtacgggactgtgtcaaataatttgcaaaactcaaatactggtccaactactggaactgtcaatcaccaaggagcgttacctggtatggtgtggcaggatcgagacgtgtacctgcagggacccatttgggccaagattcctcacaccgatggacactttcatccttctccactgatgggaggttttggactcaaacacccgcctcctcagatcatgatcaaaaacactcccgttccagccaatcctcctacaaacttcagttctgccaagtttgcttccttcatcacacagtattccacgggacaagtcagcgtggagattgagtgggagctgcagaaggagaacagcaaacgctggaaccccgagatccagtacacttccaactacaacaaatctgttaatgtggactttactgtggacactaatggcgtgtattcagagcctcgccccattggcaccagatacctgactcgtaatctgtaa

SEQ ID NO: 4495 - DNA, 2208 bp, Artificial Sequence
  Description of Artificial Sequence: Synthetic polynucleotide
atggctgccgatggttatcttccagattggctcgaggacactctctctgaaggaataagacagtggtggaagctcaaacctggcccaccaccgccaaagcccgcagagcggcacaaggacgacagtaggggtcttgtgcttcctgggtacaagtacctcggacccttcaacggactcgacaaaggagagccggtcaacgaggcagacgccgcggccctcgagcacgacaaggcctacgaccggcagctcgacagcggagacaacccgtacctcaagtacaaccacgccgacgcggagtttcaggagcgtcttaaagaagatacgtcttttgggggcaacctcggacgagcagtattccaggcgaaaaagagggttcttgaacctctgggcctggttgaggagcctgttaagacggctccgggaaaaaagaggccggtagagcactctcctgtggagccagactcctcctcgggaaccggaaaagcgggccagcagcctgcaagaaaaagattgaattttggtcagactggagacgcagactccgtacctgacccccagcctctcggacagacaccagcagcccccacaagtttgggatctactacaatggctacaggcagtggcgcaccaatggcagacaataacgagggtgccgatggagtgggtaattcctcgggaaattggcattgcgattcccaatggctgggcgacagagtcatcaccaccagcacccgaacctgggccctgcccacctacaacaaccacctctacaagcaaatctccagccaatcaggagcatcgaacgacaaccactactttggctacagcaccccttgggggtattttgacttcaacagattccactgtcacttctccccacgtgactggcaaagactcatcaacaacaactggggattccgacccaagagactcaacttcaagctctttaacattcaagtcaaagaggtcacgcagaatgacggtacgacgacgattgccaataaccttaccagcacggttcaggtgtttactgactcggagtaccagctcccgtacgtcctcggctcggcgcatcaaggatgcctcccgccgttcccagcagacgtcttcatggtcccacagtatggatacctcaccctgaacaacgggagtcaggcggtaggacgctcttccttttactgcctggagtactttccttctcagatgcttcgtaccggaaacaactttaccttcagctacacctttgaagacgtgcctttccacagtagctacgctcacagccagagtctggatcggctgatgaatcctcttatcgaccagtacctgtattatctaaacaaaacacaatcaaatagtggaactcttcagcagtctcggctactgtttagtcaagctggacccaccagcatgtctcttcaagctaaaaactggctgcctggaccttgctacagacaacagcgtctgtcaaagcaggcaaacgacaacaacaacagcaactttccctggactgcggctacaaagtatcatctaaatggccgggactcgttggttaatccaggaccagctatggccagccacaaagacgatgaagaaaagtttttccccatgcatggaaccctgatatttggtaaacaaggaacaaatgctaacgacgcggatttggacaatgtcatgattacagatgaagaagaaatccgcaccaccaatcccgtggctacggagcagtacgggactgtgtcaaataatttgcaaaactcaaatactggtccaactactggaactgtcaatcaccaaggagcgttacctggtatggtgtggcaggatcgagacgtgtacctgcagggacccatttgggccaagattcctcacaccgatggacactttcatccttctccactgatgggaggttttggactcaaacacccgcctcctcagatcatgatcaaaaacactcccgttccagccaatcctcctacaaacttcagttctgccaagtttgcttccttcatcacacagtattccacaggacaagtcggcgtggagattgagtgggagctgcagaaggagaacagcaaacgctggaaccccgagatccagtacacttccaactacaacaaatctgttaatgtggactttactgtggacactaatggcgtgtattcagagcctcgccccattggcaccagatacctgactcgtaatctgtaa

SEQ ID NO: 4496 - DNA, 2208 bp, Artificial Sequence
  Description of Artificial Sequence: Synthetic polynucleotide
atggctgccgatggttatcttccagattggctcgaggacactctctctgaaggaataagacagtggtggaagctcaaacctggcccaccaccgccaaagcccgcagagcggcacaaggacgacagtaggggtcttgtgcttcctgggtacaagtacctcggacccttcaacggactcgacaaaggagagccggtcaacgaggcagacgccgcggccctcgagcacgacaaggcctacgaccggcagctcgacagcggagacaacccgtacctcaagtacaaccacgccgacgcggagtttcaggagcgtcttaaagaagatacgtcttttgggggcaacctcggacgagcagtattccaggcgaaaaagagggttcttgaacctctgggcctggttgaggagcctgttaagacggctccgggaaaaaagaggccggtagagcactctcctgtggagccagactcctcctcgggaaccggaaaagcgggccagcagcctgcaagaaaaagattgaattttggtcagactggagacgcagactccgtacctgacccccagcctctcggacagacaccagcagcccccacaagtttgggatctactacaatggctacaggcagtggcgcaccaatggcagacaataacgagggtgccgatggagtgggtaattcctcgggaaattggcattgcgattcccaatggctgggcgacagagtcatcaccaccagcacccgaacctgggccctgcccacctacaacaaccacctctacaagcaaatctccagccaatcaggagcatcgaacgacaaccactactttggctacagcaccccttgggggtattttgacttcaacagattccactgtcacttctccccacgtgactggcaaagactcatcaacaacaactggggattccgacccaagagactcaacttcaagctctttaacattcaagtcaaagaggtcacgcagaatgacggtacgacgacgattgccaataaccttaccagcacggttcaggtgtttactgactcggagtaccagctcccgtacgtcctcggctcggcgcatcaaggatgcctcccgccgttcccagcagacgtcttcatggtcccacagtatggatacctcaccctgaacaacgggagtcaggcggtaggacgctcttccttttactgcctggagtactttccttctcagatgcttcgtaccggaaacaactttaccttcagctacacctttgaagacgtgcctttccacagtagctacgctcacagccagagtctggatcggctgatgaatcctcttatcgaccagtacctgtattatctaaacaaaacacaatcaaatagtggaactcttcagcagtctcggctactgtttagtcaagctggacccaccagcatgtctcttcaagctaaaaactggctgcctggaccttgctacagacaacagcgtctgtcaaagcaggcaaacgacaacaacaacagcaactttccctggactgcggctacaaagtatcatctaaatggccgggactcgttggttaatccaggaccagctatggccagccacaaagacgatgaagaaaagtttttccccatgcatggaaccctgatatttggtaaacaaggaacaaatgctaacgacgcggatttggacaatgtcatgattacagatgaagaagaaatccgcaccaccaatcccgtggctacggagcagtacgggactgtgtcaaataatttgcaaaactcaaatactggtccaactactggaactgtcaatcaccaaggagcgttacctggtatggtgtggcaggatcgagacgtgtacctgcagggacccatttgggccaagattcctcacaccgatggacactttcatccttctccactgatgggaggttttggactcaaacacccgcctcctcagatcatgatcaaaaacactcccgttccagccaatcctcctacaaacttcagttctgccaagtttgcttccttcatcacacagtattccacgggacaagtcagcgtggagattgagtgggagctgcagaaggagaacagcaaacgctggaaccccgagatccagtacacttccaactacaacaaatctgttaatgtggactttactgtggacactaatggcgtgtattcagagcctcgccccattggcaccagatacctgactcgtaatctgtaa

SEQ ID NO: 4497 - DNA, 2208 bp, Artificial Sequence
  Description of Artificial Sequence: Synthetic polynucleotide
atggctgccgatggttatcttccagattggctcgaggacactctctctgaaggaataagacagtggtggaagctcaaacctggcccaccaccgccaaagcccgcagagcggcacaaggacgacagtaggggtcttgtgcttcctgggtacaagtacctcggacccttcaacggactcgacaaaggagagccggtcaacgaggcagacgccgcggccctcgagcacgacaaggcctacgaccggcagctcgacagcggagacaacccgtacctcaagtacaaccacgccgacgcggagtttcaggagcgtcttaaagaagatacgtcttttgggggcaacctcggacgagcagtattccaggcgaaaaagagggttcttgaacctctgggcctggttgaggagcctgttaagacggctccgggaaaaaagaggccggtagagcactctcctgtggagccagactcctcctcgggaaccggaaaagcgggccagcagcctgcaagaaaaagattgaattttggtcagactggagacgcagactccgtacctgacccccagcctctcggacagccaccagcagcccccacaagtttgggatctactacaatggctacaggcagtggcgcaccaatggcagacaataacgagggtgccgatggagtgggtaattcctcaggaaatcggcattgcgattcccaatggctgggcgacagagtcatcaccaccagcacccgaacctgggccctgcccacctacaacaaccacctctacaagcaaatctccagccaatcaggagcatcgaacgacaaccactactttggccacagcaccccttgggggtattttgacttcaacagattccactgtcacttctccccacgtgactggcaaagactcatcaacaacaactggggattccgacccaagagactcaacttcaagctctttaacattcaagtcaaagaggtcacgcagaatgacggtacgacgacgattgccaataaccttaccagcacggttcaggtgtttactgactcggagtaccagctcccgtacgtcctcggctcggcgcatcaaggatgcctcccgccgttcccagcagacgtcttcatggtcccacagtatggatacctcaccctgaacaacgggagtcaggcggtaggacgctcttccttttactgcctggagtactttccttctcagatgcttcgtaccggaaacaactttaccttcagctacacctttgaagacgtgcctttccacagtagctacgctcacagccagagtctggatcggctgatgaatcctcttatcgaccagtacctgtattatctaaacaaaacacaatcaaatagtggaactcttcagcagtctcggctactgtttagtcaagctggacccaccagcatgtctcttcaagctaaaaactggctgcctggaccttgctacagacaacagcgtctgtcaaagcaggcaaacgacaacaacaacagcaactttccctggactgcggctacaaagtatcatctaaatggccgggactcgttggttaatccaggaccagctatggccagccacaaagacgatgaagaaaagtttttccccatgcatggaaccctgatatttggtaaacaaggaacaaatgctaacgacgcggatttggacaatgtcatgattacagatgaagaagaaatccgcaccaccaatcccgtggctacggagcagtacgggactgtgtcaaataatttgcaaaactcaaatactggtccaactactggaactgtcaatcaccaaggagcgttacctggtatggtgtggcaggatcgagacgtgtacctgcagggacccatttgggccaagattcctcacaccgatggacactttcatccttctccactgatgggaggttttggactcaaacacccgcctcctcagatcatgatcaaaaacactcccgttccagccaatcctcctacaaacttcagttctgccaagtttgcttccttcatcacacagtattccacgggacaagtcagcgtggagattgagtgggagctgcagaaggagaacagcaaacgctggaaccccgagatccagtacacttccaactacaacaaatctgttaatgtggactttactgtggacactaatggcgtgtattcagagcctcgccccattggcaccagatacctgactcgtaatctgtaa

SEQ ID NO: 4498 - DNA, 2208 bp, Artificial Sequence
  Description of Artificial Sequence: Synthetic polynucleotide
atggctgccgatggttatcttccagattggctcgaggacactctctctgaaggaataagacagtggtggaagctcaaacctggcccaccaccgccaaagcccgcagagcggcacaaggacgacagtaggggtcttgtgcttcctgggtacaagtacctcggacccttcaacggactcgacaaaggagagccggtcaacgaggcagacgccgcggccctcgagcacgacaaggcctacgaccggcagctcgacagcggagacaacccgtacctcaagtacaaccacgccgacgcggagtttcaggagcgtcttaaagaagatacgtcttttgggggcaacctcggacgagcagtattccaggcgaaaaagagggttcttgaacctctgggcctggttgaggagcctgttaagacggctccgggaaaaaagaggccggtagagcactctcctgtggagccagactcctcctcgggaaccggaaaagcgggccagcagcctgcaagaaaaagattgaattttggtcagactggagacgcagactccgtacctgacccccagcctctcggacagccaccagcagcccccacaagtttgggatctactacaatggctacaggcagtggcgcaccaatggcagacaataacgagggtgccgatggagtgggtaattcctcaggaaattggcattgcgattcccaatggctgggcgacagagtcatcaccaccagcacccgaacctgggccctgcccacctacaacaaccacctctacaagcaaatctccagccaatcaggagcatcgaacgacaaccactactttggctacagcaccccttgggggtattttgacttcaacagattccactgtcacttctccccacgtgactggcaaagactcatcaacaacaactggggattccgacccaagagactcaacttcaagctctttaacattcaagtcaaagaggtcacgcagaatgacggtacgacgacgattgccaataaccttaccagcacggttcaggtgtttactgactcggagtaccagctcccgtacgtcctcggctcggcgcatcaaggatgcctcccgccgttcccagcagacgtcttcatggtcccacagtatggatacctcaccctgaacaacgggagtcaggcggtaggacgctcttccttttactgcctggagtactttccttctcagatgcctcgtaccggaaacaactttaccttcagctacacctttgaagacgtgcctttccacagtagctacgctcacagccagagtctggatcggctgatgaatcctcttatcgaccagtacctgtattatctaaacaaaacacaatcaaatagtggaactcttcagcagtctcggctactgtttagtcaagctggacccaccagcatgtctcttcaagctaaaaactggctgcctggaccttgctacagacaacagcgtctgtcaaagcaggcaaacgacaacaacaacagcaactttccctggactgcggctacaaagtatcatctaaatggccgggactcgttggttaatccaggaccagctatggccagccacaaagacgatgaagaaaagtttttccccatgcatggaaccctgatatttggtaaacaaggaacaaatgctaacgacgcggatttggacaatgtcatgattacagatgaagaagaaatccgcaccaccaatcccgtggctacggagcagtacgggactgtgtcaaataatttgcaaaactcaaatactggtccaactactggaactgtcaatcaccaaggagcgttacctggtatggtgtggcaggatcgagacgtgtacctgcagggacccatttgggccaagattcctcacaccgatggacactttcatccttctccactgatgggaggttttggactcaaacacccgcctcctcagatcatgatcaaaaacactcccgttccagccaatcctcctacaaacttcagttctgccaagtttgcttccttcatcacacagtattccacgggacaagtcagcgtggagattgagtgggagctgcagaaggagaacagcaaacgctggaaccccgagatccagtacacttccaactacaacaaatctgttaatgtggactttactgtggacactaatggcgtgtattcagagcctcgccccattggcaccagatacctgactcgtaatctgtaa

SEQ ID NO: 4499 - DNA, 2208 bp, Artificial Sequence
  Description of Artificial Sequence: Synthetic polynucleotide
atggctgccgatggttatcttccagattggctcgaggacactctctctgaaggaataagacagtggtggaagctcaaacctggcccaccaccgccaaagcccgcagagcggcacaaggacgacagtaggggtcttgtgcttcctgggtacaagtacctcggacccttcaacggactcgacaaaggagagccggtcaacgaggcagacgccgcggccctcgagcacgacaaggcctacgaccggcagctcgacagcggagacaacccgtacctcaagtacaaccacgccgacgcggagtttcaggagcgtcttaaagaagatacgtcttttgggggcaacctcggacgagcagtattccaggcgaaaaagagggttcttgaacctctgggcctggttgaggagcctgttaagacggctccgggaaaaaagaggccggtagagcactctcctgtggagccagactcctcctcgggaaccggaaaagcgggccagcagcctgcaagaaaaagattgaattttggtcagactggagacgcagactccgtacctgacccccagcctctcggacagccaccagcagcccccacaagtttgggatctactacaatggctacaggcagtggcgcaccaatggcagacaataacgagggtgccgatggagtgggtaattcctcgggaaattggcattgcgattcccaatggctgggcgacagagtcatcaccaccagcacccgaacctgggccctgcccacctacaacaaccacctctacaagcaaatctccagccaatcaggagcatcgaacgacaaccactactttggctacagcaccccttgggggtattttgacttcaacagattccactgtcacttctccccacgtgactggcaaagactcatcaacaacaactggggattccgacccaagagactcaacttcaagctctttaacattcaagtcaaagaggtcacgcagaatgacggtacgacgacgattgccaataaccttaccagcacggttcaggtgtttactgactcggagtaccagctcccgtacgtcctcggctcggcgcatcaaggatgcctcccgccgttcccagcagacgtcttcatggtcccacagtatggatacctcaccctgaacaacgggagtcaggcggtaggacgctcttccttttactgcctggagtactttccttctcagatgcttcgtaccggaaacaactttaccttcagctacacctttgaagacgtgcctttccacagtagctacgctcacagccagagtctggatcggctgatgaatcctcttatcgaccagtacctgtattatctaaacaaaacacaatcaaatagtggaactcttcagcagtctcggctactgtttagtcaagctggacccaccagcatgtctcttcaagctaaaaactggctgcctggaccttgctacagacaacagcgtctgtcaaagcaggcaaacgacaacaacaacagcaactttccctggactgcggctacaaagtatcatctaaatggccgggactcgttggttaatccaggaccagctatggccagccacaaagacgatgaagaaaagtttttccccatgcatggaaccctgatatttggtaaacaaggaacaaatgctaacgacgcggatttggacaatgtcatgattacagatgaagaagaaatccgcaccaccaatcccgtggctacggagcagtacgggactgtgtcaaataatttgcaaaactcaaatactggtccaactactggaactgtcaatcaccaaggagcgttacctggtatggtgtggcaggatcgagacgtgtacctgcagggacccatttgggccaagattcctcacaccgatggacactttcatccttctccactgatgggaggttttggactcaaacacccgcctcctcagatcatgatcaaaaacactcccgttccagccaatcctcctacaaacttcagttctgccaagtctgcttccttcatcacacagtattccacgggacaagtcagcgtggagattgagtgggagctgcagaaggagaacagcaaacgctggaaccccgagatccagtacacttccaactacaacaaatctgttaatgtggactttactgtggacactaatggcgtgtattcagagcctcgccccattggcaccagatacctgactcgtaatctgtaa

SEQ ID NO: 4500 - DNA, 2208 bp, Artificial Sequence
  Description of Artificial Sequence: Synthetic polynucleotide
atggctgccgatggttatcttccagattggctcgaggacactctctctgaaggaataagacagtggtggaagctcaaacctggcccaccaccgccaaagcccgcagagcggcacaaggacgacagtaggggtcttgtgcttcctgggtacaagtacctcggacccttcaacggactcgacaaaggagagccggtcaacgaggcagacgccgcggccctcgagcacgacaaggcctacgaccggcagctcgacagcggagacaacccgtacctcaagtacaaccacgccgacgcggagtttcaggagcgtcttaaagaagatacgtcttttgggggcaacctcggacgagcagtattccaggcgaaaaagagggttcttgaacctctgggcctggttgaggagcctgttaagacggctccgggaaaaaagaggccggtagagcactctcctgtggagccagactcctcctcgggaaccggaaaagcgggccagcagcctgcaagaaaaagattgaattttggtcagactggagacgcagactccgtacctgacccccagcctctcggacagccaccagcagcccccacaagtttgggatctactacaatggctacaggcagtggcgcaccaatggcagacaataacgagggtgccgatggagtgggtaattcctcaggaaattggcattgcgattcccaatggctgggcgacagagtcatcaccaccagcacccgaacctgggccctgcccacctacaacaaccacctctacaagcaaatctccagccaatcaggagcatcgaacgacaaccactactttggccacagcaccccttgggggtattttgacttcaacagattccactgtcacttctccccacgtgactggcaaagactcatcaacaacaactggggattccgacccaagagactcaacttcaagctctttaacattcaagtcaaagaggtcacgcagaatgacggtacgacgacgattgccaataaccttaccagcacggttcaggtgtttactgactcggagtaccagctcccgtacgtcctcggctcggcgcatcaaggatgcctcccgccgttcccagcagacgtcttcatggtcccacagtatggatacctcaccctgaacaacgggagtcaggcggtaggacgctcttccttttactgcctggagtactttccttctcagatgcttcgtaccggaaacaactttaccttcagctacacctttgaagacgcgcctttccacagtagctacgctcacagccagagtctggatcggctgatgaatcctcttatcgaccagtacctgtattatctaaacaaaacaaacaatcaaagtggaaccttcacgcagtctcggctactgtttagtcaagctggacccaccagcattctcttcaagtctaaaaactggctgcctggaccttgctacagacaacagcgtctgtcaaagacagcaaacgacaacaacaacagcaactttccctggactgcggctacaaagtatcatctaaatggccgggactcgttggttaatccaggaccagctatggccagccacaaagacgatgaagaaaagttttttccccagcatggaaccctgatatttggtaaacaaggaacaaagctaacagacgcggatttggacaatgtcatgattacagatgaagaagaaatccgcaccaccaatcccgtggctacggagcagtacgggactgtgtcaaataatttgcagaaactcaacatactggcaactactggaactgtcaacacacaaggagcgttacctggtatggtgtggcaggatcgagacgtgtacctgcagggacccatttgggccaagattcctcacaccgatggacactttcatccttctccactgatgggaggttttggactcaaacacccgcctcctcagatcatgatcaaaaacactcccgttccagccaatcctcctacaaacttcagttctgccaagtttgcttccttcatcacacagtattccacgggacaagtcagcgtggagattgagtgggagctgcagaaggagaacagcaaacgctggaaccccgagatccagtacacttccaactacaacaaatctgttaatgtggactttactgtggacactaatggcgtgtattcagagcctcgccccattggcaccagatacctgactcgtaatctgtaa

SEQ ID NO: 4501 - DNA, 2208 bp, Artificial Sequence
  Description of Artificial Sequence: Synthetic polynucleotide
atggctgccgatggttatcttccagattggctcgaggacactctctctgaaggaataagacagtggtggaagctcaaacctggcccaccaccgccaaagcccgcagagcggcacaaggacgccagtaggggtcttgtgcttcctgggtacaagtacctcggacccttcaacggactcgacaaaggagagccggtcaacgaggcagacgccgcggccctcgagcacgacaaggcctacgaccggcagctcgacagcggagacaacccgtacctcaagtacaaccacgccgacgcggagtttcaggagcgtcttaaagaagatacgtcttttgggggcaacctcggacgagcagtattccaggcgaaaaagagggttcttgaacctctgggcctggttgaggagcctgttaagacggctccgggaaaaaagaggccggtagagcactctcctgtggagccagactcctcctcgggaaccggaaaagcgggccagcagcctgcaagaaaaagattgaattttggtcagactggagacgcagactccgtacctgacccccagcctctcggacagccaccagcagcccccacaagtttgggatctactacaatggctacaggcagtggcgcaccaatggcagacaataacgagggtgccgatggagtgggtaattcctcaggaaattggcattgcgattcccaatggctgggcgacagagtcatcaccaccagcacccgaacctgggccctgcccacctacaacaaccacctctacaagcaaatctccagccaatcaggagcatcgaacgacaaccactactttggctacagcaccccttgggggtattttgacttcaacagattccactgtcacttctccccacgtgactggcaaagactcatcaacaacaactggggattccgacccaagagactcaacttcaagctctttaacattcaagtcaaagaggtcacgcagaatgacggtacgacgacgattgccaataaccttaccagcacggttcaggtgtttactgactcggagtaccagctcccgtacgtcctcggctcggcgcatcaaggatgcctcccgccgttcccagcagacgtcttcatggtcccacagtatggatacctcaccctgaacaacgggagtcaggcggtaggacgctcttccttttactgcctggagtactttccttctcagatgcttcgtaccggaaacaactttaccttcagctacacctttgaagacgtgcctttccacagtagctacgctcacagccagagtctggatcggctgatgaatcctcttatcgaccagtacctgtattatctaaacaaaacaaacaatcaaagtggaaccttcacgcagtctcggctactgtttagtcaagctggacccaccagcattctcttcaagtctaaaaactggctgcctggaccttgctacagacaacagcgtctgtcaaagacagcaaacgacaacaacaacagcaactttccctggactgcggctacaaagtatcatctaaatggccgggactcgttggttaatccaggaccagctatggccagccacaaagacgatgaagaaaagttttttcccatgcatggaaccctgatatttggtaaacaaggaacaaagctaacagacgcggatttggacaatgtcatgattacagatgaagaagaaatccgcaccaccaatcccgtggctacggagcagtacgggactgtgtcaaataatttgcagaaactcaacatactggcaactactggaactgtcaacacacaaggagcgttacctggtatggtgtggcaggatcgagacgtgtacctgcagggacccatttgggccaagattcctcacaccgatggacactttcatccttctccactgatgggaggttttggactcaaacacccgcctcctcagatcatgatcaaaaacactcccgttccagccaatcctcctacaaacttcagttctgccaagtttgcttccttcatcacacagtattccacgggacaagtcagcgtggagattgagtgggagctgcagaaggagaacagcaaacgctggaaccccgagatccagtacacttccaactacaacaaatctgttaatgtggactttactgtggacactaatggcgtgtattcagagcctcgccccattggcaccagatacctgactcgtaatctgtaa

SEQ ID NO: 4502 - DNA, 2208 bp, Artificial Sequence
  Description of Artificial Sequence: Synthetic polynucleotide
atggctgccgatggttatcttccagattggctcgaggacactctctctgaaggaataagacagtggtggaagctcaaacctggcccaccaccaccaaagcccgcagagcggcataaggacgacagcaggggtcttgtgcttcctgggtacaagtacctcggacccttcaacggactcgacaagggagagccggtcaacgaggcagacgccgcggccctcgagcacgacaaagcctacgaccggcagctcgacagcggagacaacccgtacctcaagtacaaccacgccgacgcggagtttcaggagcgccttaaagaagatacgtcttttgggggcaacctcggacgagcagtcttccaggcgaaaaagagggttcttgaacctctgggcctggttgaggaacctgttaagacggctccgggaaaaaagaggccggtagagcactctcctgtggagccagactcctcctcgggaaccggaaaggcgggccagcagcctgcaagaaaaagattgaattttggtcagactggagacgcagactcagtacctgacccccagcctctcggacagccaccagcagccccctctggtctgggaactaatacgatggctacaggcagtggcgcaccaatggcagacaataacgagggcgccgacggagtgggtaattcctcgggaaattggcattgcgattccacatggatgggcgacagagtcatcaccaccagcacccgaacctgggccctgcccacctacaacaaccacctctacaagcaaatctccagccaatcaggagcatcgaacgacaaccactactttggctacagcaccccttgggggtattttgacttcaacagattccactgtcacttctccccacgtgactggcaaagactcatcaacaacaactggggattccgacccaagagactcaacttcaagctctttaacattcaagtcaaagaggtcacgcagaatgacggtacgacgacgattgccaataaccttaccagcacggttcaggtgtttactgactcggagtaccagctcccgtacgtcctcggctcggcgcatcaaggatgcctcccgccgttcccagcagacgtcttcatggtcccacagtatggatacctcaccctgaacaacgggagtcaggcggtaggacgctcttccttttactgcctggagtactttccttctcagatgcttcgtaccggaaacaactttaccttcagctacacctttgaagacgtgcctttccacagtagctacgctcacagccagagtctggatcggctgatgaatcctcttatcgaccagtacctgtattatctaaacaaaacaaacaatcaaagtggaaccttcacgcagtctcggctactgtttagtcaagctggacccaccagcattctcttcaagtctaaaaactggctgcctggaccttgctacagacaacagcgtctgtcaaagacagcaaacgacaacaacaacagcaactttccctggactgcggctacaaagtatcatctaaatggccgggactcgttggttaatccaggaccagctatggccagccacaaagacgatgaagaaaagttttttccccagcatggaaccctgatatttggtaaacaaggaacaaagctaacagacgcggatttggacaatgtcatgattacagatgaagaagaaatccgcaccaccaatcccgtggctacggagcagtacgggactgtgtcaaataatttgcagaaactcaacatactggcaactactggaactgtcaacacacaaggagcgttacctggtatggtgtggcaggatcgagacgtgtacctgcagggacccatttgggccaagattcctcacaccgatggacactttcatccttctccactgatgggaggttttggactcaaacacccgcctcctcagatcatgatcaaaaacactcccgttccagccaatcctcctacaaacttcagttctgccaagtttgcttccttcatcacacagtattccacgggacaagtcagcgtggagattgagtgggagctgcagaaggagaacagcaaacgctggaaccccgagatccagtacacttccaactacaacaaatctgttaatgtggactttactgtggacactaatggcgtgtattcagagcctcgccccattggcaccagatacctgactcgtaatctgtaa

SEQ ID NO: 4503 - DNA, 2208 bp, Artificial Sequence
  Description of Artificial Sequence: Synthetic polynucleotide
atggctgccgatggttatcttccagattggctcgaggacactctctctgaaggaataagacagtggtggaagctcaaacctggcccaccaccgccaaagcccgcagagcggcacaaggacgacagtaggggtcttgtgcttcctgggtacaagtacctcggacccttcaacggactcgacaaaggagagccggtcaacgaggcagacgccgcggccctcgagcacgacaaggcctacgaccggcagctcgacagcggagacaacccgtacctcaagtacaaccacgccgacgcggagtttcaggagcgtcttaaagaagatacgtcttttgggggcaacctcggacgagcagtattccaggcgaaaaagagggttcttgaacctctgggcctggttgaggagcctgttaagacggctccgggaaaaaagaggccggtagagcactctcctgtggagccagactcctcctcgggaaccggaaaagcgggccagcagcctgcaagaaaaagattgaattttggtcagactggagacgcagactccgtacctgacccccagcctctcggacagccaccagcagcccccacaagtttgggatctactacaatggctacaggcagtggcgcaccaatggcagacaataacgagggtgccgatggagtgggtaattcctcaggaaattggcattgcgattcccaatggctgggcgacagagtcatcaccaccagcacccgaacctgggccctgcccacctacaacaaccacctctacaagcaaatctccagccaatcaggagcatcgaacgacaaccactactttggccacagcaccccttgggggtattttgacttcaacagattccactgtcacttctccccacgtgactggcaaagactcatcaacaacaactggggattccgacccaagagactcaacttcaagctctttaacattcaagtcaaagaggtcacgcagaatgacggtacgacgacgattgccaataaccttaccagcacggttcaggtgtttactgactcggagtaccagctcccgtacgtcctcggctcggcgcatcaaggatgcctcccgccgttcccagcagacgtcttcatggtcccacagtatggatacctcaccctgaacaacgggagtcaggcggtaggacgctcttccttttactgcctggagtactttccttctcagatgcttcgtaccggaaacaactttaccttcagctacacctttgaagacgtgcctttccacagtagctacgctcacagccagagtctggatcggctgatgaatcctcttatcgaccagtacctgtattatctaaacaaaacaaacaatcaaagtggaaccttcacgcagtctcggctactgtttagtcaagctggacccaccagcattctcttcaagtctaaaaactggctgcctggaccttgctacagacaacagcgtctgtcaaagacagcaaacgacaacaacaacagcaactttccctggactgcggctacaaagtatcatctaaatggccgggactcgttggttaatccaggaccagctatggccagccacaaagacgatgaagaaaagttttttcccatgcatggaaccctgatatttggtaaacaaggaacaaagctaacagacgcggatttggacaatgtcatgattacagatgaagaagaaatccgcaccaccaatcccgtggctacggagcagtacgggactgtgtcaaataatttgcagaaactcaacatactggcaactactggaactgtcaacacacaaggagcgttacctggtatggtgtggcaggatcgagacgtgtacctgcagggacccatttgggccaagattcctcacaccgatggacactttcatccttctccactgatgggaggttttggactcaaacacccgcctcctcagatcatgatcaaaaacactcccgttccagccaatcctcctacaaacttcagttctgccaagtttgcttccttcatcacacagtattccacgggacaagtcagcgtggagattgagtgggagctgcagaaggagaacagcaaacgctggaaccccgagatccagtacacttccaactacaacaaatctgttaatgtggactttactgtggacactaatggcgtgtattcagagcctcgccccattggcaccagatacctgactcgtaatctgtaa

SEQ ID NO: 4504 - DNA, 2208 bp, Artificial Sequence
  Description of Artificial Sequence: Synthetic polynucleotide
atggctgccgatggttatcttccagattggctcgaggacactctctctgaaggaataagacagtggtggaagctcaaacctggcccaccaccgccaaagcccgcagagcggcacaaggacgacagtaggggtcttgtgcttcctgggtacaagtacctcggacccttcaacggactcgacaaaggagagccggtcaacgaggcagacgccgcggccctcgagcacgacaaggcctacgaccggcagctcgacagcggagacaacccgtacctcaagtacaaccacgccgacgcggagtttcaggagcgtcttaaagaagatacgtcttttgggggcaacctcggacgagcagtattccaggcgaaaaagagggttcttgaacctctgggcctggttgaggagcctgttaagacggctccgggaaaaaagaggccggtagagcactctcctgtggagccagactcctcctcgggaaccggaaaagcgggccagcagcctgcaagaaaaagattgaattttggtcagactggagacgcagactccgtacctgacccccagcctctcggacagccaccagcagcccccacaagtttgggatctactacaatggctacaggcagtggcgcaccaatggcagacaataacgagggtgccgatggagtgggtaattcctcaggaaattggcattgcgattcccaatggctgggcgacagagtcatcaccaccagcacccgaacctgggccctgcccacctacaacaaccacctctacaagcaaatctccagccaatcaggagcatcgaacgacaaccactactttggctacagcaccccttgggggtattttgacttcaacagattccactgtcacttctccccacgtgactggcaaagactcatcaacaacaactggggattccgacccaagagactcaacttcaagctctttaacattcaagtcaaagaggtcacgcagaatgacggtacgacgacgattgccaataaccttaccagcacggttcaggtgtttactgactcggagtaccagctcccgtacgtcctcggctcggcgcatcaaggatgcctcccgccgttcccagcagacgtcttcatggtcccacagtatggatacctcaccctgaacaacgggagtcaggcggtaggacgctcttccttttactgcctggagtactttccttctcagatgcttcgtaccggaaacaactttaccttcagctacacctttgaagacgtgcctttccacagtagctacgctcacagccagagtctggatcggctgatgaatcctcttatcgaccagtacctgtattatctaaacaaaacaaacaatcaaagtggaaccttcacgcagtctcggctactgtttagtcaagctggacccaccagcattctcttcaagtctaaaaactggctgcctggaccttgctacagacaacagcgtctgtcaaagacagcaaacgacaacaacaacagcaactttccctggactgcggctacaaagtatcatctaaatggccgggactcgttggttaatccaggaccagctatggccagccacaaagacgatgaagaaaagttttttccccagcatggaaccctgatatttggtaaacaaggaacaaagctaacagacgcggatttggacaatgtcatgattacagatgaagaagaaatccgcaccaccaatcccgtggctacggagcagtacgggactgtgtcaaataatttgcagaaactcaacatactggcaactactggaactgtcaacacacaaggagcgttacctggtatggtgtggcaggatcgagacgtgtacctgcagggacccatttgggccaagattcctcacaccgatggacactttcatccttctccactgatgggaggttttggactcaaacacccgcctcctcagatcatgatcaaaaacactcccgttccagccaatcctcctacaaacttcagttctgccaagtttgcttccttcatcacacagtattccacgggacaagtcagcgtggagattgagtgggagctgcagaaggagaacagcaaacgctggaaccccgagatccagtacacttccaactacaacaaatctgttaatgtggactttactgtggacactaatggcgtgtattcagagcctcgccccattggcaccagatacctgactcgtaatctgtaa

SEQ ID NO: 4505 - DNA, 2208 bp, Artificial Sequence
  Description of Artificial Sequence: Synthetic polynucleotide
atggctgccgatggttatcttccagattggctcgaggacactctctctgaaggaataagacagtggtggaagctcaaacctggcccaccaccgccaaagcccgcagagcggcacaaggacgccagtaggggtcttgtgcttcctgggtacaagtacctcggacccttcaacggactcgacaaaggagagccggtcaacgaggcagacgccgcggccctcgagcacgacaaggcctacgaccggcagctcgacagcggagacaacccgtacctcaagtacaaccacgccgacgcggagtttcaggagcgtcttaaagaagatacgccttttgggggcaacctcggacgagcagtattccaggcgaaaaagagggttcttgaacctctgggcctggttgaggagcctgttaagacggctccgggaaaaaagaggccggtagagcactctcctgtggagccagactcctcctcgggaaccggaaaagcgggccagcggcctgcaagaaaaagattgaattttggtcagactggagacgcagactccgtacctgacccccagcctctcggacagccaccagcagcccccacaagtttgggatctactacaatggctacaggcagtggcgcaccaatggcagacaataacgagggtgccgatggagtgggtaattcctcaggaaattggcattgcgattcccaatggctgggcgacagagtcatcaccaccagcacccgaacctgggccctgcccacctacaacaaccacctctacaagcaaatccccagccaatcaggagcatcgaacgacaaccactactttggctacagcaccccttgggggtattttgacttcaacagattccactgtcacttctccccacgtgactggcaaagactcatcaacaacaactggggattccgacccaagagactcaacttcaagctctttaacattcaagtcaaagaggtcacgcagaatgacggtacgacgacgattgccaataaccttaccagcacggttcaggtgtttactgactcggagtaccagctcccgtacgtcctcggctcggcgcatcaaggatgcctcccgccgttcccagcagacgtcttcatggtcccacagtatggatacctcaccctgaacaacgggagtcaggcggtaggacgctcttccttttactgcctggagtactttccttctcagatgcttcgtaccggaaacaactttaccttcagctacacctttgaagacgtgcctttccacagtagctacgctcacagccagagtctggatcggctgatgaatcctcttatcgaccagtacctgtattatctaaacaaaacaaacaatcaaagtggaaccttcacgcagtctcggctactgtttagtcaagctggacccaccagcattctcttcaagtctaaaaactggctgcctggaccttgctacagacaacagcgtctgtcaaagacagcaaacgacaacaacaacagcaactttccctggactgcggctacaaagtatcatctaaatggccgggactcgttggttaatccaggaccagctatggccagccacaaagacgatgaagaaaagttttttccccaacatggaaccctgatatttggtaaacaaggaacaaagctaacagacgcggatttggacaatgtcatgattacagatgaagaagaaatccgcaccaccaatcccgtggctacggagcagtacgggactgtgtcaaataatttgcagaaactcaacatactggcaactactggaactgtcaacacacaaggagcgttacctggtatggtgtggcaggatcgagacgtgtacctgcagggacccatttgggccaagattcctcacaccgatggacactttcatccttctccactgatgggaggttttggactcaaacacccgcctcctcagatcatgatcaaaaacactcccgttccagccaatcctcctacaaacttcagttctgccaagtttgcttccttcatcacacagtattccacgggacaagtcagcgtggagattgagtgggagctgcagaaggagaacagcaaacgctggaaccccgagatccagtacacttccaactacaacaaatctgttaatgtggactttactgtggacactaatggcgtgtattcagagcctcgccccattggcaccagatacctgactcgtaatctgtaa

SEQ ID NO: 4506 - DNA, 2208 bp, Artificial Sequence
  Description of Artificial Sequence: Synthetic polynucleotide
atggctgccgatggttatcttccagattggctcgaggacactctctctgaaggaataagacagtggtggaagctcaaacctggcccaccaccaccaaagcccgcagagcggcataaggacgacagcaggggtcttgtgcttcctgggtacaagtacctcggacccttcaacggactcgacaagggagagccggtcaacgaggcagacgccgcggccctcgagcacgacaaagcctacgaccggcagctcgacagcggagacaacccgtacctcaagtacaaccacgccgacgcggagtttcaggagcgccttaaagaagatacgtcttttgggggcaacctcggacgagcagtcttccaggcgaaaaagagggttcttgaacctctgggcctggttgaggaacctgttaagacggctccgggaaaaaagaggccggtagagcactctcctgtggagccagactcctcctcgggaaccggaaaggcgggccagcagcctgcaagaaaaagattgaattttggtcagactggagacgcagactcagtacctgacccccagcctctcggacagccaccagcagccccctctggtctgggaactaatacgatggctacaggcagtggcgcaccaatggcagacaataacgagggcgccgacggagtgggtaattcctcgggaaattggcattgcgattccacatggatgggcgacagagtcatcaccaccagcacccgaacctgggccctgcccacctacaacaaccacctctacaaacaaatttccagccaatcaggagcctcgaacgacaatcactactttggctacagcaccccttgggggtattttgacttcaacagattccactgccacttttcaccacgtgactggcaaagactcatcaacaacaactggggattccgacccaagagactcaacttcaagctctttaacattcaagtcaaagaggtcacgcagaatgacggtacgacgacgattgccaataaccttaccagcacggttcaggtgtttactgactcggagtaccagctcccgtacgtcctcggctcggcgcatcaaggatgcctcccgccgttcccagcagacgtcttcatggtcccacagtatggatacctcaccctgaacaacgggagtcaggcggtaggacgctcttccttttactgcctggagtactttccttctcagatgcttcgtaccggaaacaactttaccttcagctacacctttgaagacgcgcctttccacagtagctacgctcacagccagagtctggatcggctgatgaatcctcttatcgaccagtacctgtattatctaaacaaaacaaacaatcaaagtggaaccttcacgcagtctcggctactgtttagtcaagctggacccaccagcattctcttcaagtctaaaaactggctgcctggaccttgctacagacaacagcgtctgtcaaagacagcaaacgacaacaacaacagcaactttccctggactgcggctacaaagtatcatctaaatggccgggactcgttggttaatccaggaccagctatggccagccacaaagacgatgaagaaaagttttttccccagcatggaaccctgatatttggtaaacaaggaacaaagctaacagacgcggatttggacaatgtcatgattacagatgaagaagaaatccgcaccaccaatcccgtggctacggagcagtacgggactgtgtcaaataatttgcagaaactcaacatactggcaactactggaactgtcaacacacaaggagcgttacctggtatggtgtggcaggatcgagacgtgtacctgcagggacccatttgggccaagattcctcacaccgatggacactttcatccttctccactgatgggaggttttggactcaaacacccgcctcctcagatcatgatcaaaaacactcccgttccagccaatcctcctacaaacttcagttctgccaagtttgcttccttcatcacacagtattccacgggacaagtcagcgtggagattgagtgggagctgcagaaggagaacagcaaacgctggaaccccgagatccagtacacttccaactacaacaaatctgttaatgtggactttactgtggacactaatggcgtgtattcagagcctcgccccattggcaccagatacctgactcgtaatctgtaa

SEQ ID NO: 4507 - DNA, 2208 bp, Artificial Sequence
  Description of Artificial Sequence: Synthetic polynucleotide
atggctgccgatggttatcttccagattggctcgaggacattctctctgaaggaataagacagtggtggaagctcaaacctggcccaccaccgccaaagcccgcagagcggcacaaggacgccagtaggggtcttgtgcttcctgggtacaagtacctcggacccttcaacggactcgacaaaggagagccggtcaacgaggcagacgccgcggccctcgagcacgacaaggcctacgaccggcagctcgacagcggagacaacccgtacctcaagtacaaccacgccgacgcggagtttcaggagcgtcttaaagaagatacgtcttttgggggcaacctcggacgagcagtattccaggcgaaaaagagggttcttgaacctctgggcctggttgaggagcctgttaagacggctccgggaaaaaagaggccggtagagcactctcctgtggagccagactcctcctcgggaaccggaaaagcgggccagcagcctgcaagaaaaagattgaattttggtcagactggagacgcagactccgtacctgacccccagcctctcggacagccaccagcagcccccacaagtttgggatctactacaatggctacaggcagtggcgcaccaatggcagacaataacgagggtgccgatggagtgggtaattcctcaggaaattggcattgcgattcccaatggctgggcgacagagtcatcaccaccagcacccgaacctgggccctgcccacctacaacaaccacctctacaagcaaatctccagccaatcaggagcatcgaacgacaaccactactttggctacagcaccccttgggggtattttgacttcaacagattccactgtcacttctccccacgtgactggcaaagactcatcaacaacaactggggattccgacccaagagactcaacttcaagctctttaacattcaagtcaaagaggtcacgcagaatgacggtacgacgacgattgccaataaccttaccagcacggttcaggtgtttactgactcggagtaccagctcccgtacgtcctcggctcggcgcatcaaggatgcctcccgccgttcccagcagacgtcttcatggtcccacagtatggatacctcaccctgaacaacgggagtcaggcggtaggacgctcttccttttactgcctggagtactttccttctcagatgcttcgtaccggaaacaactttaccttcagctacacctttgaagacgtgcctttccacagtagctacgctcacagccagagtctggatcggctgatgaatcctcttatcgaccagtacctgtattatctaaacaaaacaaacaatcaaagtggaaccttcacgcagtctcggctactgtttagtcaagctggacccaccagcattctcttcaagtctaaaaactggctgcctggaccttgctacagacaacagcgtctgtcaaagacagcaaacgacaacaacaacagcaactttccctggactgcggctacaaagtatcatctaaatggccgggactcgttggttaatccaggaccagctatggccagccacaaagacgatgaagaaaagttttttccccagcatggaaccctgatatttggtaaacaaggaacaaagctaacagacgcggatttggacaatgtcatgattacagatgaagaagaaatccgcaccaccaatcccgtggctacggagcagtacgggactgtgtcaaataatttgcagaaactcaacatactggcaactactggaactgtcaacacacaaggagcgttacctggtatggtgtggcaggatcgagacgtgtacctgcagggacccatttgggccaagattcctcacaccgatggacactttcatccttctccactgatgggaggttttggactcaaacacccgcctcctcagatcatgatcaaaaacactcccgttccagccaatcctcctacaaacttcagttctgccaagtttgcttccttcatcacacagtattccacgggacaagtcagcgtggagattgagtgggagctgcagaaggagaacagcaaacgctggaaccccgagatccagtacacttccaactacaacaaatctgttaatgtggactttactgtggacactaatggcgtgtattcagagcctcgccccattggcaccagatacctgactcgtaatctgtaa

SEQ ID NO: 4508 - DNA, 2208 bp, Artificial Sequence
  Description of Artificial Sequence: Synthetic polynucleotide
atggctgccgatggttatcttccagattggctcgaggacattctctctgaaggaataagacagtggtggaagctcaaacctggcccaccaccgccaaagcccgcagagcggcacaaggacgccagtaggggtcttgtgcttcctgggtacaagtacctcggacccttcaacggactcgacaaaggagagccggtcaacgaggcagacgccgcggccctcgagcacgacaaggcctacgaccggcagctcgacagcggagacaacccgtacctcaagtacaaccacgccgacgcggagtttcaggagcgtcttaaagaagatacgtcttttgggggcaacctcggacgagcagtattccaggcgaaaaagagggttcttgaacctctgggcctggttgaggagcctgttaagacggctccgggaaaaaagaggccggtagagcactctcctgtggagccagactcctcctcgggaaccggaaaagcgggccagcagcctgcaagaaaaagattgaattttggtcagactggagacgcagactccgtacctgacccccagcctctcggacagccaccagcagcccccacaagtttgggatctactacaatggctacaggcagtggcgcaccaatggcagacaataacgagggtgccgatggagtgggtaattcctcaggaaattggcattgcgattcccaatggctgggcgacagagtcatcgccaccagcacccgaacctgggccctgcccacctacaacaaccacctctacaagcaaatctccagccaatcaggagcatcgaacgacaaccactactttggctacagcaccccttgggggtattttgacttcaacagattccactgtcacttctccccacgtgactggcaaagactcatcaacaacaactggggattccgacccaagagactcaacttcaagctctttaacattcaagtcaaagaggtcacgcagaatgacggtacgacgacgattgccaataaccttaccagcacggttcaggtgtttactgactcggagtaccagctcccgtacgtcctcggctcggcgcatcaaggatgcctcccgccgttcccagcagacgtcttcatggtcccacagtatggatacctcaccctgaacaacgggagtcaggcggtaggacgctcttccttttactgcctggagtactttccttctcagatgcttcgtaccggaaacaactttaccttcagctacacctttgaagacgtgcctttccacagtagctacgctcacagccagagtctggatcggctgatgaatcctcttatcgaccagtacctgtattatctaaacaaaacaaacaatcaaagtggaaccttcacgcagtctcggctactgcttagtcaagctggacccaccagcattctcttcaagtctaaaaactggctgcctggaccttgctacagacaacagcgtctgtcaaagacagcaaacgacaacaacaacagcaactttccctggactgcggctacaaagtatcatctaaatggccgggactcgttggttaatccaggaccagctatggccagccacaaagacgatgaagaaaagttttttccccaacatggaaccctgatatttggtaaacaaggaacaaagctaacagacgcggatttggacaatgtcatgattacagatgaagaagaaatccgcaccaccaatcccgtggctacggagcagtacgggactgtgtcaaataatttgcagaaactcaacatactggcaactactggaactgtcaacacacaaggagcgttacctggtatggtgtggcaggatcgagacgtgtacctgcagggacccatttgggccaagattcctcacaccgatggacactttcatccttctccactgatgggaggttttggactcaaacacccgcctcctcagatcatgatcaaaaacactcccgttccagccaatcctcctacaaacttcagttctgccaagtttgcttccttcatcacacagtattccacgggacaagtcagcgtggagattgagtgggagctgcagaaggagaacagcaaacgctggaaccccgagatccagtacacttccaactacaacaaatctgttaatgtggactttactgtggacactaatggcgtgtattcagagcctcgccccattggcaccagatacctgactcgtaatctgtaa

SEQ ID NO: 4509 - DNA, 2208 bp, Artificial Sequence
  Description of Artificial Sequence: Synthetic polynucleotide
atggctgccgatggttatcttccagattggctcgaggacactctctctgaaggaataagacagtggtggaagctcaaacctggcccaccaccgccaaagcccgcagagcggcacaaggacgccagtaggggtcttgtgcttcctgggtacaagtacctcggacccttcaacggactcgacaaaggagagccggtcaacgaggcagacgccgcggccctcgagcacgacaaggcctacgaccggcagctcgacagcggagacaacccgtacctcaagtacaaccacgccgacgcggagtttcaggagcgtcttaaagaagatacgccttttgggggcaacctcggacgagcagtattccaggcgaaaaagagggttcttgaacctctgggcctggttgaggagcctgttaagacggctccgggaaaaaagaggccggtagagcactctcctgtggagccagactcctcctcgggaaccggaaaagcgggccagcagcctgcaagaaaaagattgaattttggtcagactggagacgcagactccgtacctgacccccagcctctcggacagccaccagcagcccccacaagtttgggatctactacaatggctacaggcagtggcgcaccaatggcagacaataacgagggtgccgatggagtgggtaattcctcaggaaattggcattgcgattcccaatggctgggcgacagagtcatcaccaccagcacccgaacctgggccctgcccacctacaacaaccacctctacaagcaaatccccagccaatcaggagcatcgaacgacaaccactactttggctacagcaccccttgggggtattttgacttcaacagattccactgtcacttctccccacgtgactggcaaagactcatcaacaacaactggggattccgacccaagagactcaacttcaagctctttaacattcaagtcaaagaggtcacgcagaatgacggtacgacgacgattgccaataaccttaccagcacggttcaggtgtttactgactcggagtaccagctcccgtacgtcctcggctcggcgcatcaaggatgcctcccgccgttcccagcagacgtcttcatggtcccacagtatggatacctcaccctgaacaacgggagtcaggcggtaggacgctcttccttttactgcctggagtactttccttctcagatgcttcgtaccggaaacaactttaccttcagctacacctttgaagacgtgcctttccacagtagctacgctcacagccagagtctggatcggctgatgaatcctcttatcgaccagtacctgtattatctaaacaaaacaaacaatcaaagtggaaccttcacgcagtctcggctactgtttagtcaagctggacccaccagcattctcttcaagtctaaaaactggctgcctggaccttgctacagacaacagcgtctgtcaaagacagcaaacgacaacaacaacagcaactttccctggactgcggctacaaagtatcatctaaatggccgggactcgttggttaatccaggaccagctatggccagccacaaagacgatgaagaaaagttttttccccaacatggaaccctgatatttggtaaacaaggaacaaagctaacagacgcggatttggacaatgtcatgattacagatgaagaagaaatccgcaccaccaatcccgtggctacggagcagtacgggactgtgtcaaataatttgcagaaactcaacatactggcaactactggaactgtcaacacacaaggagcgttacctggtatggtgtggcaggatcgagacgtgtacctgcagggacccatttgggccaagattcctcacaccgatggacactttcatccttctccactgatgggaggttttggactcaaacacccgcctcctcagatcatgatcaaaaacactcccgttccagccaatcctcctacaaacttcagttctgccaagtttgcttccttcatcacacagtattccacgggacaagtcagcgtggagattgagtgggagctgcagaaggagaacagcaaacgctggaaccccgagatccagtacacttccaactacaacaaatctgttaatgtggactttactgtggacactaatggcgtgtattcagagcctcgccccattggcaccagatacctgactcgtaatctgtaa

SEQ ID NO: 4510 - DNA, 2208 bp, Artificial Sequence
  Description of Artificial Sequence: Synthetic polynucleotide
atggctgccgatggttatcttccagattggctcgaggacactctctctgaaggaataagacagtggtggaagctcaaacctggcccaccaccaccaaagcccgcagagcggcataaggacgacagcaggggtcttgtgcttcctgggtacaagtacctcggacccttcaacggactcgacaagggagagccggtcaacgaggcagacgccgcggccctcgagcacgacaaagcctacgaccggcagctcgacagcggagacaacccgtacctcaagtacaaccacgccgacgcggagtttcaggagcgccttaaagaagatacgtcttttgggggcaacctcggacgagcagtcttccaggcgaaaaagagggttcttgaacctctgggcctggttgaggaacctgttaagacggctccgggaaaaaagaggccggtagagcactctcctgtggagccagactcctcctcgggaaccggaaaggcgggccagcagcctgcaagaaaaagattgaawtttggtcagactggagacgcagactcagtacctgacccccagcctctcggacagccaccagcagccccctctggtctsggaactaatacgatggctacaggcagtggcgcaccaatggcagacaataacgagggcgccgacgkagtgggtaattcctcgggaaattggcattgcgattccacatggatgggcgacagagtcatcaccaccagcacccgaacctgggccctgcccacctacaacaaccacctctacaaacaaatttccagccaatcaggagcctcgaacgacaatcactactttggctacagcaccccttgggggtattttgacttcaacagattccactgccacttttcaccacgtgactggcaaagactcatcaacaacaactggggattccgacccaagagactcaacttcaagctctttaacattcaagtcaaagaggtcacgcagaatgacggtacgacgacgattgccaataaccttaccagcacggttcaggtgtttactgactcggagtaccagctcccgtacgtcctcggctcggcgcatcaaggatgcctcccgccgttcccagyagacgtcttcatggtgccacagtatggatacctcaccctgaacaacgggagtcaggcagtaggacgctcttcattttactgcctggagtactttccttctcagatgctgcgtaccggaaacaactttaccttcagctacacttttgaggacgttcctttccacagcagctacgctcacagccagagtctggaycgkctsatgaatcctctyatcgaccagtacctgtattatctaaacaaaacaaacaatcaaagtggaaccttcacgcagtctcggctactgtttagtcaagctggacccaccagcattctcttcaagtctaaaaactggctgcctggaccttgctacagacaacagcgtctgtcaaagacagcaaacgacaacaacaacagcaamtttccctggactgcggctacaaagtatcatctaaatggccgggactcgttggttaatccaggaccagctatggccagccacaaagacgatgaagaaaagttttttcccatgcatggaaccytgatatttggtaaacaaggaacaaagctaacagacgcggatttggacaatgtcrtgattacagatgaagaagaaatccgcaccaccaatcccgtggctacggagcagtacgggactgtgtcaaataatttgcagaaactcaacatactgscaactactggaactgtcaacwcacaaggagcgttacctggtatggtgtggcaggatcgagacgtgtacctgcagggacccatttgggccaagattcctcacaccgatggacactttcacccttctccactgatgggaggttttggactcaaacacccgcctcctcagatcatgatcaaaaacactccsgttccagcsaatcctcctacaaacttcagttatgcaaagtttgcttccttcatcacacagtattccacgggacaagtcagcgtggagatggagtgggagctgcagaaggagaacagcaaacgctggaaccccgagattccatacacttccaaatacaacaaatctgttaatgtggactttactgtggacactaatggcgtgtattcagagcctcgccccattggcacccgatacctgactcgtaatctgtaa

SEQ ID NO: 4511 - DNA, 2208 bp, Artificial Sequence
  Description of Artificial Sequence: Synthetic polynucleotide
atggctgccgatggttatcttccagattggctcgaggacactctctctgaaggaataagacagtggtggaagctcaaacctggcccaccaccaccaaagcccgcagagcggcatcaggacgacagcaggggtcttgtgcttcctgggtacaagtacctcggacccttcaacggactcgacaaaggagagccggtcaacgaggcagacgctgcggccctcgagcacgacaaggcctacgaccggcagctcgacagcggagacaacccgtacctcaagtacaaccacgccgacgcggagtttcaggagcgtcttaaagaagatacgtcttttgggggcaacctcggacgagcagtcttccaggcgaaaaagagggttcttgaacctctgggcctggttgaggaacctgttaagacggctccgggaaaaaagaggccggtagagcactctcctgcggagccagactcctcctcgggaaccggaaaagcgggccagcagcctgcaagaaagagattgaatttcggtcagactggagacgcagactccgtacctgacccccagcctctcggacagccaccagcagcccccacaagtttgggatctactacaatggctacaggcagtggcgcaccaatggcagacaataacgagggtgccgatggagtgggtaattcctcaggaaattggcattgcgattcccaatggctgggcgacagagtcatcaccaccagcacccgaacctgggccctgcccacctacaacaaccacctctacaagcaaatctccagccaatcaggagcatcgaacgacaaccactactttggctacagcaccccttgggggtattttgacttcaacagattccactgtcacttctccccacgtgactggcaaagactcatcaacaacaactggggattccgacccaagagactcaacttcaagctctttaacattcaagtcaaagaggtcacgcagaatgacggtacgacgacgattgccaataaccttaccagcacggttcaggtgtttactgactcggagtaccagctcccgtacgtcctcggctcggcgcatcaaggatgcctcccgccgtttccagcggacgtcttcatggtcccacagtatggatacctcaccctgaacaacgggagtcaggcggtaggacgctcttccttttactgcctggagtactttccttctcagatgctgcgtaccggaaacaactttaccttcagctacacctttgaggacgtgcctttccacagcagctacgctcacagccagagtttggaccggctgatgaatcctctgatcgaccagtatctgtattatctgaacaggacacaatcaaatagtggaactcttcagcagtctaggctactgtttagccaagctggacccaccagcatgtctcttcaagctaaaaactggctgcctggaccttgctacagacagcagcgtctgtcaaagcaggcaaacgacaacaacaacagcaactttccctggactgcggctacaaagtatcatctaaatggtcgggactcgttggttaatccaggaccagctatggccagccacaaagacgatgaagaaaagtttttccccatgcatggaaccctgatatttggtaaacaaggaacaaatgctaacgacgcggatttggaacatgtcatgattacagatgaagaagaaatcaggaccaccaatcccgtggctacagagcagtacggaaacgtgtcaaataatttgcaaaactcaaatactggtccaactacagaaaatgtcaatcaccagggagcgttacctggtatggtgtggcaggatcgagacgtgtacctgcagggacccatttgggccaagattcctcacaccgacggacactttcacccttctccactgatgggaggttttggactcaaacacccgcctcctcaaatcatgatcaaaaacactcctgttccagccaatcctcctacaaacttcagcgcggcaaagtttgcttccttcatcacacagtattccacgggacaggccagcgtggagatcgagtgggagctgcagaaggagaacagcaaacgctggaaccccgagatccagtacacttccaactacaacaaatctgttaatgtggactttactgtggacactaatggtgtgtattcagagcctcgccccattggcaccagatacctgactcgtaatctgtaa

SEQ ID NO: 4512 - DNA, 2208 bp, Artificial Sequence
  Description of Artificial Sequence: Synthetic polynucleotide
atggctgccgatggttatcttccagattggctcgaggacactctctctgaaggaataagacagtggtggaagctcaaacctggcccaccaccgccaaagcccgcagagcggcacaaggacgacagtaggggtcttgtgcttcctgggtacaagtacctcggacccttcaacggactcgacaaaggagagccggtcaacgaggcagacgccgcggccctcgagcacgacaaggcctacgaccggcagctcgacagcggagacaacccgtacctcaagtacaaccacgccgacgcggagtttcaggagcgtcttaaagaagatacgtcttttgggggcaacctcggacgagcagtattccaggcgaaaaagagggttcttgaacctctgggcctggttgaggagcctgttaagacggctccgggaaaaaagaggccggtagagcactctcctgtggagccagactcctcctcgggaaccggaaaagcgggccagcagcctgcaagaaaaagattgaattttggtcagactggagacgcagactccgtacctgacccccagcctctcggacagccaccagcagcccccacaagtttgggatctactacaatggctacaggcagtggcgcaccaatggcagacaataacgagggtgccgatggagtgggtaattcctcaggaaattggcattgcgattcccaatggctgggcgacagagtcatcaccaccagcacccgaacctgggccctgcccacctacaacaaccacctctacaagcaaatctccagccaatcaggagcatcgaacgacaaccactactttggccacagcaccccttgggggtattttgacttcaacagattccactgtcacttctccccacgtgactggcaaagactcatcaacaacaactggggattccgacccaagagactcaacttcaagctctttaacattcaagtcaaagaggtcacgcagaatgacggtacgacgacgattgccaataaccttaccagcacggttcaggtgtttactgactcggagtaccagctcccgtacgtcctcggctcggcgcatcaaggatgcctcccgccgttcccagcagacgtcttcatggtcccacagtatggatacctcaccctgaacaacgggagtcaggcggtaggacgctcttccttttactgcctggagtactttccttctcagatgcttcgtaccggaaacaactttaccttcagctacacctttgaagacgtgcctttccacagtagctacgctcacagccagagtctggatcggctgatgaatcctcttatcgaccagtacctgtattatctaaacaaaacacaatcaaatagtggaactcttcagcagtctcggctactgtttagtcaagctggacccaccagcatgcctcttcaagctaaaaactggctgcctggaccttgctacagacaacagcgtctgtcaaagcaggcaaacgacaacaacaacagcaactttccctggactgcggctacaaagtatcatctaaatggccgggactcgttggttaatccaggaccagctatggccagccacaaagacgatgaagaaaagtttttccccatgcatggaaccctgatatttggtaaacaaggaacaaatgctaacgacgcggatttggacaatgtcatgattacagatgaagaagaaatccgcaccaccaatcccgtggctacggagcagtacgggactgtgtcaaataatttgcaaaactcaaatactggtccaactactggaactgtcaatcaccaaggagcgttacctggtatggtgtggcaggatcgagacgtgtacctgcagggacccatttgggccaagattcctcacaccgatggacactttcatccttctccactgatgggaggttttggactcaaacacccgcctcctcagatcatgatcaaaaacactcccgttccagccaatcctcctacaaacttcagttctgccaagtttgcttccttcatcacacagtattccacgggacaagtcagcgtggagattgagtgggagctgcagaaggagaacagcaaacgctggaaccccgagatccagtacacttccaactacaacaaatctgttaatgtggactttactgtggacactaatggcgtgtattcagagcctcgccccattggcaccagatacctgactcgtaatctgtaa

SEQ ID NO: 4513 - DNA, 2208 bp, Artificial Sequence
  Description of Artificial Sequence: Synthetic polynucleotide
atggctgccgatggttatcttccagattggctcgaggacactctctctgaaggaataagacagtggtggaagctcaaacctggcccaccaccgccaaagcccgcagagcggcacaaggacgacagtaggggtcttgtgcttcctgggtacaagtacctcggacccttcaacggactcgacaaaggagagccggtcaacgaggcagacgccgcggccctcgagcacgacaaggcctacgaccggcagctcgacagcggagacaacccgtacctcaagtacaaccacgccgacgcggagtttcaggagcgtcttaaagaagatacgtcttttgggggcaacctcggacgagcagtattccaggcgaaaaagagggttcttgaacctctgggcctggttgaggagcctgttaagacggctccgggaaaaaagaggccggtagagcactctcctgtggagccagactcctcctcgggaaccggaaaagcgggccagcagcctgcaagaaaaagattgaattttggtcagactggagacgcagactccgtacctgacccccagcctctcggacagccaccagcagcccccacaagtttgggatctactacaatggctacaggcagtggcgcaccaatggcagacaataacgagggtgccgatggagtgggtaattcctcaggaaattggcattgcgattcccaatggctgggcgacagagtcatcaccaccagcacccgaacctgggccctgcccacctacaacaaccacctctacaagcaaatctccagccaatcaggagcatcgaacgacaaccactactttggccacagcaccccttgggggtattttgacttcaacagattccactgtcacttctccccacgtgactggcaaagactcatcaacaacaactggggattccgacccaagagactcaacttcaagctctttaacattcaagtcaaagaggtcacgcagaatgacggtacgacgacgattgccaataaccttaccagcacggttcaggtgtttactgactcggagtaccagctcccgtacgtcctcggctcggcgcatcaaggatgcctcccgccgttcccagcagacgtcttcatggtcccacagtatggatacctcaccctgaacaacgggagtcaggcggtaggacgctcttccttttactgcctggagtactttccttctcagatgcttcgtaccggaaacaactttaccttcagctacacctttgaagacgtgcctttccacagtagctacgctcacagccagagtctggatcggctgatgaatcctcttatcgaccagtacctgtattatctaaacaaaacacaatcaaatagtggaactcttcagcagtctcggctactgtttagtcaagctggacccaccagcatgtctcttcaagctaaaaactggctgcctggaccttgctacagacaacagcgtctgtcaaagcaggcaaacgacaacaacaacagcaactttccctggactgcggctacaaagtatcatctaaatggccgggactcgttggttaatccaggaccagctatggccagccacaaagacgatgaagaaaagtttttccccatgcatggaaccctgatatttggtaaacaaggaacaaatgctaacgacgcggatttggacaatgtcatgattacagatgaagaagaaatccgcaccaccaatcccgtggctacggagcagtacgggactgtgtcaaataatttgcaaaactcaaatactggtccaactactggaactgccaatcaccaaggagcgttacctggtatggtgtggcaggatcgagacgtgtacctgcagggacccatttgggccaagattcctcacaccgatggacactttcatccttctccactgatgggaggttttggactcaaacacccgcctcctcagatcatgatcaaaaacactcccgttccagccaatcctcctacaaacttcagttctgccaagtttgcttccttcatcacacagtattccacgggacaagtcagcgtggagattgagtgggagctgcagaaggagaacagcaaacgctggaaccccgagatccagtacacttccaactacaacaaatctgttaatgtggactttactgtggacactaatggcgtgtattcagagcctcgccccattggcaccagatacctgactcgtaatctgtaa

SEQ ID NO: 4514 - DNA, 2208 bp, Artificial Sequence
  Description of Artificial Sequence: Synthetic polynucleotide
atggctgccgatggttatcttccagattggctcgaggacactctctctgaaggaataagacagtggtggaagctcaaacctggcccaccaccgccaaagcccgcagagcggcacaaggacgacagtaggggtcttgtgcttcctgggtacaagtacctcggacccttcaacggactcgacaaaggagagccggtcaacgaggcagacgccgcggccctcgagcacgacaaggcctacgaccggcagctcgacagcggagacaacccgtacctcaagtacaaccacgccgacgcggagtttcaggagcgtcttaaagaagatacgtcttttgggggcaacctcggacgagcagtattccaggcgaaaaagagggttcttgaacctctgggcctggttgaggagcctgttaagacggctccgggaaaaaagaggccggtagagcactctcctgtggagccagactcctcctcgggaaccggaaaagcgggccagcagcctgcaagaaaaagattgaattttggtcagactggagacgcaggctccgtacctgacccccagcctctcggacagccaccagcagcccccacaagtttgggatctactacaatggctacaggcagtggcgcaccaatggcagacaataacgagggtgccgatggagtgggtaattcctcaggaaattggcattgcgattcccaatggctgggcgacagagtcatcaccaccagcacccgaacctgggccctgcccacctacaacaaccacctctacaagcaaatctccagccaatcaggagcatcgaacgacaaccactactttggccacagcaccccttgggggtattttgacttcaacagattccactgtcacttctccccacgtgactggcaaagactcatcaacaacaactggggattccgacccaagagactcaacttcaagctctttaacattcaagtcaaagaggtcacgcagaatgacggtacgacgacgattgccaataaccttaccagcacggttcaggtgtttactgactcggagtaccagctcccgtacgtcctcggctcggcgcatcaaggatgcctcccgccgttcccagcagacgtcttcatggtcccacagtatggatacctcaccctgaacaacgggagtcaggcggtaggacgctcttccttttactgcctggagtactttccttctcagatgcttcgtaccggaaacaactttaccttcagctacacctttgaagacgtgcctttccacagtagctacgctcacagccagagtctggatcggctgatgaatcctcttatcgaccagtacctgtattatctaaacaaaacacaatcaaatagtggaactcttcagcagtctcggctactgtttagtcaagctggacccaccagcatgtctcttcaagctaaaaactggctgcctggaccttgctacagacaacagcgtctgtcaaagcaggcaaacgacaacaacaacagcaactttccctggactgcggctacaaagtatcatctaaatggccgggactcgttggttaatccaggaccagctatggccagccacaaagacgatgaagaaaagtttttccccatgcatggaaccctgatatttggtaaacaaggaacaaatgctaacgacgcggatttggacaatgtcatgattacagatgaagaagaaatccgcaccaccaatcccgtggctacggagcagtacgggactgtgtcaaataatttgcaaaactcaaatactggtccaactactggaactgtcaatcaccaaggagcgttacctggtatggtgtggcaggatcgagacgtgtacctgcagggacccatttgggccaagattcctcacaccgatggacactttcatccttctccactgatgggaggttttggactcaaacacccgcctcctcagatcatgatcaaaaacactcccgttccagccaatcctcctacaaacttcagttctgccaagtttgcttccttcatcacacagtattccacgggacaagtcagcgtggagattgagtgggagctgcagaaggagaacagcaaacgctggaaccccgagatccagtacacttccaactacaacaaatctgttaatgtggactttactgtggacactaatggcgtgtattcagagcctcgccccattggcaccagatacctgactcgtaatctgtaa

SEQ ID NO: 4515 - DNA, 2208 bp, Artificial Sequence
  Description of Artificial Sequence: Synthetic polynucleotide
atggctgccgatggttatcttccagattggctcgaggacactctctctgaaggaataagacagtggtggaagctcaaacctggcccaccaccgccaaagcccgcagagcggcacaaggacgacagtaggggtcttgtgcttcctgggtacaagtacctcggacccttcaacggactcgacaaaggagagccggtcaacgaggcagacgccgcggccctcgagcacgacaaggcctacgaccggcagctcgacagcggagacaacccgtacctcaagtacaaccacgccgacgcggagtttcaggagcgtcttaaagaagatacgtcttttgggggcaacctcggacgagcagtattccaggcgaaaaagagggttcttgaacctctgggcctggttgaggagcctgttaagacggctccgggaaaaaagaggccggtagagcactctcctgtggagccagactcctcctcgggaaccggaaaagcgggccagcagcctgcaagaaaaagattgaattttggtcagactggagacgcagactccgtacctgacccccagcctctcggacagccaccagcagcccccacaagtttgggatctactacaatggctacaggcagtggcgcaccaatggcagacaataacgagggtgccgatggagtgggtaattcctcaggaaattggcattgcgattcccaatggctggacgacagagtcatcaccaccagcacccgaacctgggccctgcccacctacaacaaccacctctacaagcaaatctccagccaatcaggagcatcgaacgacaaccactactttggccacagcaccccttgggggtattttgacttcaacagattccactgtcacttctccccacgtgactggcaaagactcatcaacaacaactggggattccgacccaagagactcaacttcaagctctttaacattcaagtcaaagaggtcacgcagaatgacggtacgacgacgattgccaataaccttaccagcacggttcaggtgtttactgactcggagtaccagctcccgtacgtcctcggctcggcgcatcaaggatgcctcccgccgttcccagcagacgtcttcatggtcccacagtatggatacctcaccctgaacaacgggagtcaggcggtaggacgctcttccttttactgcctggagtactttccttctcagatgcttcgtaccggaaacaactttaccttcagctacacctttgaagacgtgcctttccacagtagctacgctcacagccagagtctggatcggctgatgaatcctcttatcgaccagtacctgtattatctaaacaaaacacaatcaaatagtggaactcttcagcagtctcggctactgtttagtcaagctggacccaccagcatgtctcttcaagctaaaaactggctgcctggaccttgctacagacaacagcgtctgtcaaagcaggcaaacgacaacaacaacagcaactttccctggactgcggctacaaagtatcatctaaatggccgggactcgttggttaatccaggaccagctatggccagccacaaagacgatgaagaaaagtttttccccatgcatggaaccctgatatttggtaaacaaggaacaaatgctaacgacgcggatttggacaatgtcatgattacagatgaagaagaaatccgcaccaccaatcccgtggctacggagcagtacgggactgtgtcaaataatttgcaaaactcaaatactggtccaactactggaactgtcaatcaccaaggagcgttacctggtatggtgtggcaggatcgagacgtgtacctgcagggacccatttgggccaagattcctcacaccgatggacactttcatccttctccactgatgggaggttttggactcaaacacccgcctcctcagatcatgatcaaaaacactcccgttccagccaatcctcctacaaacttcagttctgccaagtttgcttccttcatcacacagtattccacgggacaagtcagcgtggagattgagtgggagctgcagaaggagaacagcaaacgctggaaccccgagatccagtacacttccaactacaacaaatctgttaatgtggactttactgtggacactaatggcgtgtattcagagcctcgccccattggcaccagatacctgactcgtaatctgtaa

SEQ ID NO: 4516 - DNA, 2208 bp, Artificial Sequence
  Description of Artificial Sequence: Synthetic polynucleotide
atggctgccgatggttatcttccagattggctcgaggacactctctctgaaggaataagacagtggtggaagctcaaacctggcccaccaccgccaaagcccgcagagcggcacaaggacgacagtaggggtcttgtgcttcctgggtacaagtacctcggacccttcaacggactcgacaaaggagagccggtcaacgaggcagacgccgcggccctcgagcacgacaaggcctacgaccggcagctcgacagcggagacaacccgtacctcaagtacaaccacgccgacgcggagtttcaggagcgtcttaaagaagatacgtcttttgggggcaacctcggacgagcagtattccaggcgaaaaagagggttcttgaacctctgggcctggttgaggagcctgttaagacggctccgggaaaaaagaggccggtagagcactctcctgtggagccaggctcctcctcgggaaccggaaaagcgggccagcagcctgcaagaaaaagattgaattttggtcagactggagacgcagactccgtacctgacccccagcctctcggacagccaccagcagcccccacaagtttgggatctactacaatggctacaggcagtggcgcaccaatggcagacaataacgagggtgccgatggagtgggtaattcctcaggaaattggcattgcgattcccaatggctgggcgacagagtcatcaccaccagcacccgaacctgggccctgcccacctacaacaaccacctctacaagcaaatctccagccaatcaggagcatcgaacgacaaccactactttggccacagcaccccttgggggtattttgacttcaacagattccactgtcacttctccccacgtgactggcaaagactcatcaacaacaactggggattccgacccaagagactcaacttcaagctctttaacattcaagtcaaagaggtcacgcagaatgacggtacgacgacgattgccaataaccttaccagcacggttcaggtgtttactgactcggagtaccagctcccgtacgtcctcggctcggcgcatcaaggatgcctcccgccgttcccagcagacgtcttcatggtcccacagtatggatacctcaccctgaacaacgggagtcaggcggtaggacgctcttccttttactgcctggagtactttccttctcagatgcttcgtaccggaaacaactttaccttcagctacacctttgaagacgtgcctttccacagtagctacgctcacagccagagtctggatcggctgatgaatcctcttatcgaccagtacctgtattatctaaacaaaacacaatcaaatagtggaactcttcagcagtctcggctactgtttagtcaagctggacccaccagcatgtctcttcaagctaaaaactggctgcctggaccttgctacagacaacagcgtctgtcaaagcaggcaaacgacaacaacaacagcaactttccctggactgcggctacaaagtatcatctaaatggccgggactcgttggttaatccaggaccagctatggccagccacaaagacgatgaagaaaagtttttccccatgcatggaaccctgatatttggtaaacaaggaacaaatgctaacgacgcggatttggacaatgtcatgattacagatgaagaagaaatccgcaccaccaatcccgtggctacggagcagtacgggactgtgtcaaataatttgcaaaactcaaatactggtccaactactggaactgtcaatcaccaaggagcgttacctggtatggtgtggcaggatcgagacgtgtacctgcagggacccatttgggccaagattcctcacaccgatggacactttcatccttctccactgatgggaggttttggactcaaacacccgcctcctcagatcatgatcaaaaacactcccgttccagccaatcctcctacaaacttcagttctgccaagtttgcttccttcatcacacagtattccacgggacaagtcagcgtggagattgagtgggagctgcagaaggagaacagcaaacgctggaaccccgagatccagtacacttccaactacaacaaatctgttaatgtggactttactgtggacactaatggcgtgtattcagagcctcgccccattggcaccagatacctgactcgtaatctgtaa

SEQ ID NO: 4517 - DNA, 2208 bp, Artificial Sequence
  Description of Artificial Sequence: Synthetic polynucleotide
atggctgccgatggttatcttccagattggctcgaggacactctctctgaaggaataagacagtggtggaagctcaaacctggcccaccaccgccaaagcccgcagagcggcacaaggacgacagtaggggtcttgtgcttcctgggtacaagtacctcggacccttcaacggactcgacaaaggagagccggtcaacgaggcagacgccgcggccctcgagcacgacaaggcctacgaccggcagctcgacagcggagacaacccgtacctcaagtacaaccacgccgacgcggagtttcaggagcgtcttaaagaagatacgtcttttgggggcaacctcggacgagcagtattccaggcgaaaaagagggttcttgaacctctgggcctggttgaggagcctgttaagacggctccgggaaaaaagaggccggtagagcactctcctgtggagccagactcctcctcgggaaccggaaaagcgggccagcagcctgcaagaaaaagattgaattttggtcagactggagacgcagactccgtacctgacccccagcctctcggacagccaccagcagcccccacaagtttgggatctactacaatggctacaggcagtggcgcaccaatggcagacaataacgagggtgccgatggagtgggtaattcctcaggaaattggcattgcgattcccaatggctgggcgacagagtcatcaccaccagcacccgaacctgggccctgcccacctacaacaaccacctctacaagcaaatctccagccaatcaggagcatcgaacgacaaccactactttggccacagcaccccttgggggtattttgacttcaacagattccactgtcacttctccccacgtgactggcaaagactcatcaacaacaactggggattccgacccaagagactcaacttcaagctctttaacattcaagtcaaagaggtcacgcagaatgacggtacgacgacgattgccaataaccttaccagcacggttcaggtgtttactgactcggagtaccagctcccgtacgtcctcggctcggcgcatcaaggatgcctcccgccgttcccagcagacgtcttcatggtcccacagtatggatacctcaccctgaacaacgggagtcaggcggtaggacgctcttccttttactgcctggagtactttccttctcagatgcttcgtaccggaaacaactttaccttcagctacacctttgaagacgtgcctttccacagtagctacgctcacagccagagtctggatcggctgatgaatcctcttatcgaccagtacctgtattatctaaacaaaacacaatcaaatagtggaactcttcagcagtctcggctactgtttagtcaagctggacccaccagcatgtctcttcaagctaaaaactggctgcctggaccttgctacagacaacagcgtctgtcaaagcaggcaaacgacaacaacaacagcaactttccctggactgcggctacaaagtatcatctaaatggccgggactcgttggttaatccaggaccagctatggccagccacaaagacgatgaagaaaagtttttccccatgcatggaaccctgatatttggtaaacaaggaacaaatgctaacgacgcggatttggacaatgtcatgattacagatgaagaagaaatccgcaccaccaatcccgtggctacggagcagtacgggactgtgtcaaataatttgcaaaactcaaatactggtccaactactggaactgtcaatcaccaaggagcgttacctggtatggtgtggcaggatcgagacgtgtacctgcagggacccatttgggccaagattcctcacaccgatggacactttcatccttctccactgatgggaggttttggactcaaacacccgcctcctcagatcatgatcaaaaacactcccgttccagccaatcctcctacaaacttcagttctgccaagtttgcttccttcatcacacagtattccacgggacaagtcagcgtggagattgggtgggagctgcagaaggagaacagcaaacgctggaaccccgagatccagtacacttccaactacaacaaatctgttaatgtggactttactgtggacactaatggcgtgtattcagagcctcgccccattggcaccagatacctgactcgtaatctgtaa

SEQ ID NO: 4518 - DNA, 2208 bp, Artificial Sequence
  Description of Artificial Sequence: Synthetic polynucleotide
atggctgccgatggttatcttccagattggctcgaggacactctctctgaaggaataagacagtggtggaagctcaaacctggcccaccaccgccaaagcccgcagagcggcacaaggacgacagtaggggtcttgtgcttcctgggtacaagtacctcggacccttcaacggactcgacaaaggagagccggtcaacgaggcagacgccgcggccctcgagcacgacaaggcctacgaccggcagctcgacagcggagacaacccgtacctcaagtacaaccacgccgacgcggagtttcaggagcgtcttaaagaagatacgtcttttgggggcaacctcggacgagcagtattccaggcgaaaaagagggttcttgaacctctgggcctggttgaggagcctgttaagacggctccgggaaaaaagaggccggtagagcactctcctgtggagccagactcctcctcgggaaccggaaaagcgggccagcagcctgcaagaaaaagattgaattttggtcagactggagacgcagactccgtacctgacccccagcctctcggacagccaccagcagcccccacaagtttgggatctactacaatggctacaggcagtggcgcaccaatggcagacaataacgagggtgccgatggagtgggtaattcctcaggaaattggcattgcgattcccaatggctgggcgacagagtcatcaccaccagcacccgaacctgggccctgcccacctacaacaaccacctctacaagcaaatctccagccaatcaggagcatcgaacgacaaccactactttggccacagcaccccttgggggtattttgacttcaacagattccactgtcacttctccccacgtgactggcaaagactcatcaacaacaactggggattccgacccaagagactcaacttcaagctctttaacattcaagtcaaagaggtcacgcagaatgacggtacgacgacgattgccaataaccttaccagcacggttcaggtgtttactgactcggagtaccagctcccgtacgtcctcggctcggcgcatcaaggatgcctcccgccgttcccagcagacgtcttcatggtcccacagtatggatacctcaccctgaacaacgggagtcaggcggtaggacgctcttccttttactgcctggagtactttccttctcagatgcttcgtaccggaaacaactttaccttcagctacacctttgaagacgtgcctttccacagtagctacgctcacagccagagtctggatcggctgatgaatcctcttatcgaccggtacctgtattatctaaacaaaacacaatcaaatagtggaactcttcagcagtctcggctactgtttagtcaagctggacccaccagcatgtctcttcaagctaaaaactggctgcctggaccttgctacagacaacagcgtctgtcaaagcaggcaaacgacaacaacaacagcaactttccctggactgcggctacaaagtatcatctaaatggccgggactcgttggttaatccaggaccagctatggccagccacaaagacgatgaagaaaagtttttccccatgcatggaaccctgatatttggtaaacaaggaacaaatgctaacgacgcggatttggacaatgtcatgattacagatgaagaagaaatccgcaccaccaatcccgtggctacggagcagtacgggactgtgtcaaataatttgcaaaactcaaatactggtccaactactggaactgtcaatcaccaaggagcgttacctggtatggtgtggcaggatcgagacgtgtacctgcagggacccatttgggccaagattcctcacaccgatggacactttcatccttctccactgatgggaggttttggactcaaacacccgcctcctcagatcatgatcaaaaacactcccgttccagccaatcctcctacaaacttcagttctgccaagtttgcttccttcatcacacagtattccacgggacaagtcagcgtggagattgagtgggagctgcagaaggagaacagcaaacgctggaaccccgagatccagtacacttccaactacaacaaatctgttaatgtggactttactgtggacactaatggcgtgtattcagagcctcgccccattggcaccagatacctgactcgtaatctgtaa

SEQ ID NO: 4519 - DNA, 2208 bp, Artificial Sequence
  Description of Artificial Sequence: Synthetic polynucleotide
atggctgccgatggttatcttccagattggctcgaggacactctctctgaaggaataagacagtggtggaagctcaaacctggcccaccaccgccaaagcccgcagagcggcacaaggacgacagtaggggtcttgtgcttcctgggtacaagtacctcggacccttcaacggactcgacaaaggagagccggtcaacgaggcagacgccgcggccctcgagcacgacaaggcctacgaccggcagctcgacagcggagacaacccgtacctcaagtacaaccacgccgacgcggagtttcaggagcgtcttaaagaagatacgtcttttgggggcaacctcggacgagcagtattccaggcgaaaaagagggttcttgaacctctgggcctggttgaggagcctgttaagacggctccgggaaaaaagaggccggtagagcactctcctgtggagccagactcctcctcgggaaccggaaaagcgggccagcagcctgcaagaaaaagattgaattttggtcagactggagacgcagactccgtacctgacccccagcctctcggacagccaccagcagcccccacaagtttgggatctactacaatggctacaggcagtggcgcaccaatggcagacaataacgagggtgccgatggagtgggtaattcctcaggaaattggcattgcgattcccaatggctgggcgacagagtcatcaccaccagcacccgaacctgggccctgcccacctacaacaaccacctctacaagcaaatctccagccaatcaggagcatcgaacgacaaccactactttggccacagcaccccttgggggtattttgacttcaacagattccactgtcacttctccccacgtgactggcaaagactcatcaacaacaactggggattccgacccaagagactcaacttcaagctctttaacattcaagtcaaagaggtcacgcagaatgacggtacgacgacgattgccaataaccttaccagcacggttcaggtgtttactgactcggagtaccagctcccgtacgtcctcggctcggcgcatcaaggatgcctcccgccgttcccagcagacgtcttcatggtcccacagtatggatacctcaccctgaacaacgggagtcaggcggtaggacgctcttccttttactgcctggagtactttccttctcagatgcttcgtaccggaaacaactttaccttcagctacacctttgaagacgtgcctttccacagtagctacgctcacagccagagtctggatcggctgatgaatcctcttatcgaccagcacctgtattatctaaacaaaacacaatcaaatagtggaactcttcagcagtctcggctactgtttagtcaagctggacccaccagcatgtctcttcaagctaaaaactggctgcctggaccttgctacagacaacagcgtctgtcaaagcaggcaaacgacaacaacaacagcaactttccctggactgcggctacaaagtatcatctaaatggccgggactcgttggttaatccaggaccagctatggccagccacaaagacgatgaagaaaagtttttccccatgcatggaaccctgatatttggtaaacaaggaacaaatgctaacgacgcggatttggacaatgtcatgattacagatgaagaagaaatccgcaccaccaatcccgtggctacggagcagtacgggactgtgtcaaataatttgcaaaactcaaatactggtccaactactggaactgtcaatcaccaaggagcgttacctggtatggtgtggcaggatcgagacgtgtacctgcagggacccatttgggccaagattcctcacaccgatggacactttcatccttctccactgatgggaggttttggactcaaacacccgcctcctcagatcatgatcaaaaacactcccgttccagccaatcctcctacaaacttcagttctgccaagtttgcttccttcatcacacagtattccacgggacaagtcagcgtggagattgagtgggagctgcagaaggagaacagcaaacgctggaaccccgagatccagtacacttccaactacaacaaatctgttaatgtggactttactgtggacactaatggcgtgtattcagagcctcgccccattggcaccagatacctgactcgtaatctgtaa

SEQ ID NO: 4520 - DNA, 2208 bp, Artificial Sequence
  Description of Artificial Sequence: Synthetic polynucleotide
atggctgccgatggttatcttccagattggctcgaggacactctctctgaaggaataagacagtggtggaagctcaaacctggcccaccaccgccaaagcccgcagagcggcacaaggacgacagtaggggtcctgtgcttcctgggtacaagtacctcggacccttcaacggactcgacaaaggagagccggtcaacgaggcagacgccgcggccctcgagcacgacaaggcctacgaccggcagctcgacagcggagacaacccgtacctcaagtacaaccacgccgacgcggagtttcaggagcgtcttaaagaagatacgtcttttgggggcaacctcggacgagcagtattccaggcgaaaaagagggttcttgaacctctgggcctggttgaggagcctgttaagacggctccgggaaaaaagaggccggtagagcactctcctgtggagccagactcctcctcgggaaccggaaaagcgggccagcagcctgcaagaaaaagattgaattttggtcagactggagacgcagactccgtacctgacccccagcctctcggacagccaccagcagcccccacaagtttgggatctactacaatggctacaggcagtggcgcaccaatggcagacaataacgagggtgccgatggagtgggtaattcctcaggaaattggcattgcgattcccaatggctgggcgacagagtcatcaccaccagcacccgaacctgggccctgcccacctacaacaaccacctctacaagcaaatctccagccaatcaggagcatcgaacgacaaccactactttggccacagcaccccttgggggtattttgacttcaacagattccactgtcacttctccccacgtgactggcaaagactcatcaacaacaactggggattccgacccaagagactcaacttcaagctctttaacattcaagtcaaagaggtcacgcagaatgacggtacgacgacgattgccaataaccttaccagcacggttcaggtgtttactgactcggagtaccagctcccgtacgtcctcggctcggcgcatcaaggatgcctcccgccgttcccagcagacgtcttcatggtcccacagtatggatacctcaccctgaacaacgggagtcaggcggtaggacgctcttccttttactgcctggagtactttccttctcagatgcttcgtaccggaaacaactttaccttcagctacacctttgaagacgtgcctttccacagtagctacgctcacagccagagtctggatcggctgatgaatcctcttatcgaccagtacctgtattatctaaacaaaacacaatcaaatagtggaactcttcagcagtctcggctactgtttagtcaagctggacccaccagcatgtctcttcaagctaaaaactggctgcctggaccttgctacagacaacagcgtctgtcaaagcaggcaaacgacaacaacaacagcaactttccctggactgcggctacaaagtatcatctaaatggccgggactcgttggttaatccaggaccagctatggccagccacaaagacgatgaagaaaagtttttccccatgcatggaaccctgatatttggtaaacaaggaacaaatgctaacgacgcggatttggacaatgtcatgattacagatgaagaagaaatccgcaccaccaatcccgtggctacggagcagtacgggactgtgtcaaataatttgcaaaactcaaatactggtccaactactggaactgtcaatcaccaaggagcgttacctggtatggtgtggcaggatcgagacgtgtacctgcagggacccatttgggccaagattcctcacaccgatggacactttcatccttctccactgatgggaggttttggactcaaacacccgcctcctcagatcatgatcaaaaacactcccgttccagccaatcctcctacaaacttcagttctgccaagtttgcttccttcatcacacagtattccacgggacaagtcagcgtggagattgagtgggagctgcagaaggagaacagcaaacgctggaaccccgagatccagtacacttccaactacaacaaatctgttaatgtggactttactgtggacactaatggcgtgtattcagagcctcgccccattggcaccagatacctgactcgtaatctgtaa

SEQ ID NO: 4521 - DNA, 2208 bp, Artificial Sequence
  Description of Artificial Sequence: Synthetic polynucleotide
atggctgccgatggttatcttccagattggctcgaggacactctctctgaaggaataagacagtggtggaagctcaaacctggcccaccaccgccaaagcccgcagagcggcacaaggacgacagtaggggtcttgtgcttcctgggtacaagtacctcggacccttcaacggactcgacaaaggagagccggtcaacgaggcaggcgccgcggccctcgagcacgacaaggcctacgaccggcagctcgacagcggagacaacccgtacctcaagtacaaccacgccgacgcggagtttcaggagcgtcttaaagaagatacgtcttttgggggcaacctcggacgagcagtattccaggcgaaaaagagggttcttgaacctctgggcctggttgaggagcctgttaagacggctccgggaaaaaagaggccggtagagcactctcctgtggagccagactcctcctcgggaaccggaaaagcgggccagcagcctgcaagaaaaagattgaattttggtcagactggagacgcagactccgtacctgacccccagcctctcggacagccaccagcagcccccacaagtttgggatctactacaatggctacaggcagtggcgcaccaatggcagacaataacgagggtgccgatggagtgggtaattcctcaggaaattggcattgcgattcccaatggctgggcgacagagtcatcaccaccagcacccgaacctgggccctgcccacctacaacaaccacctctacaagcaaatctccagccaatcaggagcatcgaacgacaaccactactttggccacagcaccccttgggggtattttgacttcaacagattccactgtcacttctccccacgtgactggcaaagactcatcaacaacaactggggattccgacccaagagactcaacttcaagctctttaacattcaagtcaaagaggtcacgcagaatgacggtacgacgacgattgccaataaccttaccagcacggttcaggtgtttactgactcggagtaccagctcccgtacgtcctcggctcggcgcatcaaggatgcctcccgccgttcccagcagacgtcttcatggtcccacagtatggatacctcaccctgaacaacgggagtcaggcggtaggacgctcttccttttactgcctggagtactttccttctcagatgcttcgtaccggaaacaactttaccttcagctacacctttgaagacgtgcctttccacagtagctacgctcacagccagagtctggatcggctgatgaatcctcttatcgaccagtacctgtattatctaaacaaaacacaatcaaatagtggaactcttcagcagtctcggctactgtttagtcaagctggacccaccagcatgtctcttcaagctaaaaactggctgcctggaccttgctacagacaacagcgtctgtcaaagcaggcaaacgacaacaacaacagcaactttccctggactgcggctacaaagtatcatctaaatggccgggactcgttggttaatccaggaccagctatggccagccacaaagacgatgaagaaaagtttttccccatgcatggaaccctgatatttggtaaacaaggaacaaatgctaacgacgcggatttggacaatgtcatgattacagatgaagaagaaatccgcaccaccaatcccgtggctacggagcagtacgggactgtgtcaaataatttgcaaaactcaaatactggtccaactactggaactgtcaatcaccaaggagcgttacctggtatggtgtggcaggatcgagacgtgtacctgcagggacccatttgggccaagattcctcacaccgatggacactttcatccttctccactgatgggaggttttggactcaaacacccgcctcctcagatcatgatcaaaaacactcccgttccagccaatcctcctacaaacttcagttctgccaagtttgcttccttcatcacacagtattccacgggacaagtcagcgtggagattgagtgggagctgcagaaggagaacagcaaacgctggaaccccgagatccagtacacttccaactacaacaaatctgttaatgtggactttactgtggacactaatggcgtgtattcagagcctcgccccattggcaccagatacctgactcgtaatctgtaa

SEQ ID NO: 4522 - DNA, 2208 bp, Artificial Sequence
  Description of Artificial Sequence: Synthetic polynucleotide
atggctgccgatggttatcttccagattggctcgaggacactctctctgaaggaataagacagtggtggaagctcaaacctggcccaccaccgccaaagcccgcagagcggcacaaggacgacagtaggggtcttgtgcttcctgggtacaagtacctcggacccttcaacggactcgacaaaggagagccggtcaacggggcagacgccgcggccctcgagcacgacaaggcctacgaccggcagctcgacagcggagacaacccgtacctcaagtacaaccacgccgacgcggagtttcaggagcgtcttaaagaagatacgtcttttgggggcaacctcggacgagcagtattccaggcgaaaaagagggttcttgaacctctgggcctggttgaggagcctgttaagacggctccgggaaaaaagaggccggtagagcactctcctgtggagccagactcctcctcgggaaccggaaaagcgggccagcagcctgcaagaaaaagattgaattttggtcagactggagacgcagactccgtacctgacccccagcctctcggacagccaccagcagcccccacaagtttgggatctactacaatggctacaggcagtggcgcaccaatggcagacaataacgagggtgccgatggagtgggtaattcctcaggaaattggcattgcgattcccaatggctgggcgacagagtcatcaccaccagcacccgaacctgggccctgcccacctacaacaaccacctctacaagcaaatctccagccaatcaggagcatcgaacgacaaccactactttggccacagcaccccttgggggtattttgacttcaacagattccactgtcacttctccccacgtgactggcaaagactcatcaacaacaactggggattccgacccaagagactcaacttcaagctctttaacattcaagtcaaagaggtcacgcagaatgacggtacgacgacgattgccaataaccttaccagcacggttcaggtgtttactgactcggagtaccagctcccgtacgtcctcggctcggcgcatcaaggatgcctcccgccgttcccagcagacgtcttcatggtcccacagtatggatacctcaccctgaacaacgggagtcaggcggtaggacgctcttccttttactgcctggagtactttccttctcagatgcttcgtaccggaaacaactttaccttcagctacacctttgaagacgtgcctttccacagtagctacgctcacagccagagtctggatcggctgatgaatcctcttatcgaccagtacctgtattatctaaacaaaacacaatcaaatagtggaactcttcagcagtctcggctactgtttagtcaagctggacccaccagcatgtctcttcaagctaaaaactggctgcctggaccttgctacagacaacagcgtctgtcaaagcaggcaaacgacaacaacaacagcaactttccctggactgcggctacaaagtatcatctaaatggccgggactcgttggttaatccaggaccagctatggccagccacaaagacgatgaagaaaagtttttccccatgcatggaaccctgatatttggtaaacaaggaacaaatgctaacgacgcggatttggacaatgtcatgattacagatgaagaagaaatccgcaccaccaatcccgtggctacggagcagtacgggactgtgtcaaataatttgcaaaactcaaatactggtccaactactggaactgtcaatcaccaaggagcgttacctggtatggtgtggcaggatcgagacgtgtacctgcagggacccatttgggccaagattcctcacaccgatggacactttcatccttctccactgatgggaggttttggactcaaacacccgcctcctcagatcatgatcaaaaacactcccgttccagccaatcctcctacaaacttcagttctgccaagtttgcttccttcatcacacagtattccacgggacaagtcagcgtggagattgagtgggagctgcagaaggagaacagcaaacgctggaaccccgagatccagtacacttccaactacaacaaatctgttaatgtggactttactgtggacactaatggcgtgtattcagagcctcgccccattggcaccagatacctgactcgtaatctgtaa

SEQ ID NO: 4523 - DNA, 2208 bp, Artificial Sequence
  Description of Artificial Sequence: Synthetic polynucleotide
atggctgccgatggttatcttccagattggctcgaggacactctctctgaaggaataagacagtggtggaagctcaaacctggcccaccaccgccaaagcccgcagagcggcacaaggacgacagtaggggtcttgtgcttcctgggtacaagtacctcggacccttcaacggactcgacaaaggagagccggtcaacgaggcagacgccgcggccctcgagcacgacaaggcctacgaccggcagctcgacagcggagacaacccgtacctcaagtacaaccacgccgacgcggagtttcaggagcgtcttaaagaagatacgtcttttgggggcaacctcggacgagcagtattccaggcgaaaaagagggttcttgaacctctgggcctggttgaggagcctgttaagacggctccgggaaaaaagaggccggtagagcactctcctgtggagccagactcctcctcgggaaccggaaaagcgggccagcagcctgcaagaaaaagattgaattttggtcagactggagacgcagactccgtacctgacccccagcctctcggacagccaccagcagcccccacaagtttgggatctactacaatggctacaggcagtggcgcaccaatggcagacaataacgagggtgccgatggagtgggtaattcctcaggaaattggcattgcgattcccaatggctgggcgacagagtcatcaccaccagcacccgaacctgggccctgcccacctacaacaaccacctctacaagcaaatctccagccaatcaggagcatcgaacgacaaccactactttggccacagcaccccttgggggtattttgacttcaacagattccactgtcacttctccccacgtgactggcaaagactcatcaacaacaactggggattccgacccaagagactcaacttcaagctctttaacattcaagtcaaagaggtcacgcagaatgacggtacgacgacgattgccaataaccttaccagcacggttcaggtgtttactgactcggagtaccagctcccgtacgtcctcggctcggcgcatcaaggatgcctcccgccgttcccagcagacgtcttcatggtcccacagtatggatacctcaccctgaacaacgggagtcaggcggtaggacgctcttccctttactgcctggagtactttccttctcagatgcttcgtaccggaaacaactttaccttcagctacacctttgaagacgtgcctttccacagtagctacgctcacagccagagtctggatcggctgatgaatcctcttatcgaccagtacctgtattatctaaacaaaacacaatcaaatagtggaactcttcagcagtctcggctactgtttagtcaagctggacccaccagcatgtctcttcaagctaaaaactggctgcctggaccttgctacagacaacagcgtctgtcaaagcaggcaaacgacaacaacaacagcaactttccctggactgcggctacaaagtatcatctaaatggccgggactcgttggttaatccaggaccagctatggccagccacaaagacgatgaagaaaagtttttccccatgcatggaaccctgatatttggtaaacaaggaacaaatgctaacgacgcggatttggacaatgtcatgattacagatgaagaagaaatccgcaccaccaatcccgtggctacggagcagtacgggactgtgtcaaataatttgcaaaactcaaatactggtccaactactggaactgtcaatcaccaaggagcgttacctggtatggtgtggcaggatcgagacgtgtacctgcagggacccatttgggccaagattcctcacaccgatggacactttcatccttctccactgatgggaggttttggactcaaacacccgcctcctcagatcatgatcaaaaacactcccgttccagccaatcctcctacaaacttcagttctgccaagtttgcttccttcatcacacagtattccacgggacaagtcagcgtggagattgagtgggagctgcagaaggagaacagcaaacgctggaaccccgagatccagtacacttccaactacaacaaatctgttaatgtggactttactgtggacactaatggcgtgtattcagagcctcgccccattggcaccagatacctgactcgtaatctgtaa

SEQ ID NO: 4524 - DNA, 2208 bp, Artificial Sequence
  Description of Artificial Sequence: Synthetic polynucleotide
atggctgccgatggttatcttccagattggctcgaggacactctctctgaaggaataagacagtggtggaagctcaaacctggcccaccaccgccaaagcccgcagagcggcacaaggacgacagtaggggtcttgtgcttcctgggtacaagtacctcggacccttcaacggactcgacaaaggagagccggtcaacgaggcagacgccgcggccctcgagcacgacaaggcctacgaccggcagctcgacagcggagacaacccgtacctcaagtacaaccacgccgacgcggagtttcaggagcgtcttaaagaagatacgtcttttgggggcaacctcggacgagcagtattccaggcgaaaaagagggttcttgaacctctgggcctggttgaggagcctgttaagacggctccgggaaaaaagaggccggtagagcactctcctgtggagccagactcctcctcgggaaccggaaaagcgggccagcagcctgcaagaaaaagattgaattttggtcagactggagacgcagactccgtacctgacccccagcctctcggacagccaccagcagcccccacaagtttgggatctactacaatggctacaggcagtggcgcaccaatggcagacaataacgagggtgccgatggagtgggtaattcctcaggaaattggcattgcgattcccaatggctgggcgacagagtcatcaccaccagcacccgaacctgggccctgcccacctacaacaaccacctctacaagcaaatctccagccaatcaggagcatcgaacgacaaccactactttggccacagcaccccttgggggtattttgacttcaacagattccactgtcacttctccccacgtgactggcaaagactcatcaacaacaactggggattccgacccaagagactcaacttcaagctctttaacattcaagtcaaagaggtcacgcagaatgacggtacgacgacgattgccaataaccttaccagcacggttcaggtgtttactgactcggagtaccagctcccgtacgtcctcggctcggcgcatcaaggatgcctcccgccgttcccagcagacgtcttcatggtcccacagtatggatacctcaccctgaacaacgggagtcaggcggtaggacgctcttccttttactgcctggagtactttccttctcagatgcttcgtaccggaaacaactttacctccagctacacctttgaagacgtgcctttccacagtagctacgctcacagccagagtctggatcggctgatgaatcctcttatcgaccagtacctgtattatctaaacaaaacacaatcaaatagtggaactcttcagcagtctcggctactgtttagtcaagctggacccaccagcatgtctcttcaagctaaaaactggctgcctggaccttgctacagacaacagcgtctgtcaaagcaggcaaacgacaacaacaacagcaactttccctggactgcggctacaaagtatcatctaaatggccgggactcgttggttaatccaggaccagctatggccagccacaaagacgatgaagaaaagtttttccccatgcatggaaccctgatatttggtaaacaaggaacaaatgctaacgacgcggatttggacaatgtcatgattacagatgaagaagaaatccgcaccaccaatcccgtggctacggagcagtacgggactgtgtcaaataatttgcaaaactcaaatactggtccaactactggaactgtcaatcaccaaggagcgttacctggtatggtgtggcaggatcgagacgtgtacctgcagggacccatttgggccaagattcctcacaccgatggacactttcatccttctccactgatgggaggttttggactcaaacacccgcctcctcagatcatgatcaaaaacactcccgttccagccaatcctcctacaaacttcagttctgccaagtttgcttccttcatcacacagtattccacgggacaagtcagcgtggagattgagtgggagctgcagaaggagaacagcaaacgctggaaccccgagatccagtacacttccaactacaacaaatctgttaatgtggactttactgtggacactaatggcgtgtattcagagcctcgccccattggcaccagatacctgactcgtaatctgtaa

SEQ ID NO: 4525 - DNA, 2208 bp, Artificial Sequence
  Description of Artificial Sequence: Synthetic polynucleotide
atggctgccgatggttatcttccagattggctcgaggacactctctctgaaggaataagacagtggtggaagctcaaacctggcccaccaccgccaaagcccgcagagcggcacaaggacgacagtaggggtcttgtgcttcctgggtacaagtacctcggacccttcaacggactcgacaaaggagagccggtcaacgaggcagacgccgcggccctcgagcacgacaaggcctacgaccggcagctcgacagcggagacaacccgtacctcaagtacaaccacgccgacgcggagtttcaggagcgtcttaaagaagatacgtcttttgggggcaacctcggacgagcagtattccaggcgaaaaagagggttcttgaacctctgggcctggttgaggagcctgttaagacggctccgggaaaaaagaggccggtagagcactctcctgtggagccagactcctcctcgggaaccggaaaagcgggccagcagcctgcaagaaaaagattgaattttggtcagactggagacgcagactccgtacctgacccccagcctctcggacagccaccagcagcccccacaagtttgggatctactacaatggctacaggcagtggcgcaccaatggcagacaataacgagggtgccgatggagtgggtaattcctcaggaaattggcattgcgattcccaatggctgggcgacggagtcatcaccaccagcacccgaacctgggccctgcccacctacaacaaccacctctacaagcaaatctccagccaatcaggagcatcgaacgacaaccactactttggccacagcaccccttgggggtattttgacttcaacagattccactgtcacttctccccacgtgactggcaaagactcatcaacaacaactggggattccgacccaagagactcaacttcaagctctttaacattcaagtcaaagaggtcacgcagaatgacggtacgacgacgattgccaataaccttaccagcacggttcaggtgtttactgactcggagtaccagctcccgtacgtcctcggctcggcgcatcaaggatgcctcccgccgttcccagcagacgtcttcatggtcccacagtatggatacctcaccctgaacaacgggagtcaggcggtaggacgctcttccttttactgcctggagtactttccttctcagatgcttcgtaccggaaacaactttaccttcagctacacctttgaagacgtgcctttccacagtagctacgctcacagccagagtctggatcggctgatgaatcctcttatcgaccagtacctgtattatctaaacaaaacacaatcaaatagtggaactcttcagcagtctcggctactgtttagtcaagctggacccaccagcatgtctcttcaagctaaaaactggctgcctggaccttgctacagacaacagcgtctgtcaaagcaggcaaacgacaacaacaacagcaactttccctggactgcggctacaaagtatcatctaaatggccgggactcgttggttaatccaggaccagctatggccagccacaaagacgatgaagaaaagtttttccccatgcatggaaccctgatatttggtaaacaaggaacaaatgctaacgacgcggatttggacaatgtcatgattacagatgaagaagaaatccgcaccaccaatcccgtggctacggagcagtacgggactgtgtcaaataatttgcaaaactcaaatactggtccaactactggaactgtcaatcaccaaggagcgttacctggtatggtgtggcaggatcgagacgtgtacctgcagggacccatttgggccaagattcctcacaccgatggacactttcatccttctccactgatgggaggttttggactcaaacacccgcctcctcagatcatgatcaaaaacactcccgttccagccaatcctcctacaaacttcagttctgccaagtttgcttccttcatcacacagtattccacgggacaagtcagcgtggagattgagtgggagctgcagaaggagaacagcaaacgctggaaccccgagatccagtacacttccaactacaacaaatctgttaatgtggactttactgtggacactaatggcgtgtattcagagcctcgccccattggcaccagatacctgactcgtaatctgtaa

SEQ ID NO: 4526 - DNA, 2208 bp, Artificial Sequence
  Description of Artificial Sequence: Synthetic polynucleotide
atggctgccgatggttatcttccagattggctcgaggacactctctctgaaggaataagacagtggtggaagctcaaacctggcccaccaccgccaaagcccgcagagcggcacaaggacgacagtaggggtcttgtgcttcctgggtacaagtacctcggacccttcaacggactcgacaaaggagagccggtcaacgaggcagacgccgcggccctcgagcacgacaaggcctacgaccggcagctcgacagcggagacaacccgtacctcaagtacaaccacgccgacgcggagtttcaggagcgtcttaaagaagatacgtcttttgggggcaacctcggacgagcagtattccaggcgaaaaagagggttcttgaacctctgggcctggttgaggagcctgttaagacggctccgggaaaaaagaggccggtagagcactctcctgtggagccagactcctcctcgggaaccggaaaagcgggccagcagcctgcaagaaaaagattgaattttggtcagactggagacgcagactccgtacctgacccccagcctctcggacagccaccagcagcccccacaagtttgggatctactacaatggctacaggcagtggcgcaccaatggcagacaataacgagggtgccgatggagtgggtaattcctcaggaaattggcattgcgattcccaatggctgggcgacagagtcatcaccaccagcacccgaacctgggccctgcccacctacaacaaccacctctacaagcaaatctccagccaatcaggagcatcgaacgacaaccactactttggccacagcaccccttgggggtattttgacttcaacagattccactgtcacttctccccacgtgactggcaaagactcatcaacaacaactggggattccgacccaagagactcaacttcaagctctttaacattcaagtcaaagaggtcacgcagaatgacggtacgacgacgattgccaataaccttaccagcacggttcaggtgtttactgactcggagtaccagctcccgtacgtcctcggctcggcgcatcaaggatgcctcccgccgttcccagcagacgtcttcatggtcccacagtatggatacctcaccctgaacaacgggagtcaggcggtaggacgctcttccttttactgcctggagtactttccttctcagatgcttcgtaccggaaacaactttaccttcagctacacctttgaagacgtgcctttccacagtagctacgctcacagccagagtctggatcggctgatgaatcctcttatcgaccagtacctgtattatctaaacaaaacacaatcaaatagtggaactcttcagcagtctcggctactgtttagtcaagctggacccaccagcatgtctcttcaagctaaaaactggctgcctggaccttgctacagacaacagcgtctgtcaaagcaggcaaacgacaacaacaacagcaactttccctggactgcggctacaaagtatcatctaaatggccgggactcgttggttaatccaggaccagctatggccagccacaaagacgatgaagaaaagtttttccccatgcatggaaccctgatatttggtaaacaaggaacaaatgctaacgacgcggatttggacaatgtcatgattacagatgaagaagaaatccgcaccaccaatcccgtggctacggagcagtacaggactgtgtcaaataatttgcaaaactcaaatactggtccaactactggaactgtcaatcaccaaggagcgttacctggtatggtgtggcaggatcgagacgtgtacctgcagggacccatttgggccaagattcctcacaccgatggacactttcatccttctccactgatgggaggttttggactcaaacacccgcctcctcagatcatgatcaaaaacactcccgttccagccaatcctcctacaaacttcagttctgccaagtttgcttccttcatcacacagtattccacgggacaagtcagcgtggagattgagtgggagctgcagaaggagaacagcaaacgctggaaccccgagatccagtacacttccaactacaacaaatctgttaatgtggactttactgtggacactaatggcgtgtattcagagcctcgccccattggcaccagatacctgactcgtaatctgtaa

SEQ ID NO: 4527 - DNA, 2208 bp, Artificial Sequence
  Description of Artificial Sequence: Synthetic polynucleotide
atggctgccgatggttatcttccagattggctcgaggacactctctctgaaggaataagacagtggtggaagctcaaacctggcccaccaccgccaaagcccgcagagcggcacaaggacgacagtaggggtcttgtgcttcctgggtacaagtacctcggacccttcaacggactcgacaaaggagagccggtcaacgaggcagacgccgcggccctcgagcacgacaaggcctacgaccggcagctcgacagcggagacaacccgtacctcaagtacaaccacgccgacgcggagtttcaggagcgtcttaaagaagatacgtcttttgggggcaacctcggacgagcagtattccaggcgaaaaagagggttcttgaacctctgggcctggttgaggagcctgttaagacggctccgggaaaaaagaggccggtagagcactctcctgtggagccagactcctcctcgggaaccggaaaagcgggccagcagcctgcaagaaaaagattgaattttggtcagactggagacgcagactccgtacctgacccccagcctctcggacagccaccagcagcccccacaagtttgggatctactacaatggctacaggcagtggcgcaccaatggcagacaataacgagggtgccgatggagtgggtaattcctcaggaaattggcattgcgattcccaatggctgggcgacagagtcatcaccaccagcacccgaacctgggccctgcccacctacaacaaccacctctacaagcaaatctccagccaatcaggagcatcgaacgacaaccactactttggccacagcaccccttgggggtattttgacttcaacagattccactgtcacttctccccacgtgactggcaaagactcatcaacaacaactggggattccgacccaagagactcaacttcaagctctttaacattcaagtcaaagaggtcacgcagaatgacggtacgacgacgattgccaataaccttaccagcacggttcgggtgtttactgactcggagtaccagctcccgtacgtcctcggctcggcgcatcaaggatgcctcccgccgttcccagcagacgtcttcatggtcccacagtatggatacctcaccctgaacaacgggagtcaggcggtaggacgctcttccttttactgcctggagtactttccttctcagatgcttcgtaccggaaacaactttaccttcagctacacctttgaagacgtgcctttccacagtagctacgctcacagccagagtctggatcggctgatgaatcctcttatcgaccagtacctgtattatctaaacaaaacacaatcaaatagtggaactcttcagcagtctcggctactgtttagtcaagctggacccaccagcatgtctcttcaagctaaaaactggctgcctggaccttgctacagacaacagcgtctgtcaaagcaggcaaacgacaacaacaacagcaactttccctggactgcggctacaaagtatcatctaaatggccgggactcgttggttaatccaggaccagctatggccagccacaaagacgatgaagaaaagtttttccccatgcatggaaccctgatatttggtaaacaaggaacaaatgctaacgacgcggatttggacaatgtcatgattacagatgaagaagaaatccgcaccaccaatcccgtggctacggagcagtacgggactgtgtcaaataatttgcaaaactcaaatactggtccaactactggaactgtcaatcaccaaggagcgttacctggtatggtgtggcaggatcgagacgtgtacctgcagggacccatttgggccaagattcctcacaccgatggacactttcatccttctccactgatgggaggttttggactcaaacacccgcctcctcagatcatgatcaaaaacactcccgttccagccaatcctcctacaaacttcagttctgccaagtttgcttccttcatcacacagtattccacgggacaagtcagcgtggagattgagtgggagctgcagaaggagaacagcaaacgctggaaccccgagatccagtacacttccaactacaacaaatctgttaatgtggactttactgtggacactaatggcgtgtattcagagcctcgccccattggcaccagatacctgactcgtaatctgtaa

SEQ ID NO: 4528 - DNA, 2208 bp, Artificial Sequence
  Description of Artificial Sequence: Synthetic polynucleotide
atggctgccgatggttatcttccagattggctcgaggacactctctctgaaggaataagacagtggtggaagctcaaacctggcccaccaccgccaaagcccgcagagcggcacaaggacgacagtaggggtcttgtgcttcctgggtacaagtacctcggacccttcaacggactcgacaaaggagagccggtcaacgaggcagacgccgcggccctcgagcacgacaaggcctacgaccggcagctcgacagcggagacaacccgtacctcaagtacaaccacgccgacgcggagtttcaggagcgtcttaaagaagatacgtcttttgggggcaacctcggacgagcagtattccaggcgaaaaagagggttcttgaacctctgggcctggttgaggagcctgttaagacggctccgggaaaaaagaggccggtagagcactctcctgtggagccagactcctcctcgggaaccggaaaagcgggccagcagcctgcaagaaaaagattgaattttggtcagactggagacgcagactccgtacctgacccccagcctctcggacagccaccagcagcccccacaagtttgggatctactacaatggctacaggcagtggcgcaccaatggcagacaataacgagggtgccgatggagtgggtaattcctcaggaaattggcattgcgattcccaatggctgggcgacagagtcatcaccaccagcacccgaacctgggccctgcccacctacaacaaccacctctacaagcaaatctccagccaatcaggagcatcgaacgacaaccactactttggccacagcaccccttgggggtattttgacttcaacagattccactgtcacttctccccacgtgactggcaaagactcatcaacaacaactggggattccgacccaagagactcaacttcaagctctttaacattcaagtcaaagaggtcacgcagaatgacggtacgacgacgattgccaataaccttaccagcacggttcaggtgtttactgactcggagtaccagctcccgtacgtcctcggctcggcgcatcaaggatgcctcccgccgttcccagcagacgtcttcatggtcccacagtatggatacctcaccctgaacaacgggagtcaggcggtaggacgctcttccttttactgcctggagtactttccttctcagatgcttcgtaccggaaacaactttaccttcagctacacctttgaagacgtgcctttccacagtagctacgctcacagccagagtctggatcggctgatgaatcctcttatcgaccagtacctgtattatctaaacaaaacacaatcaaatagtggaactcttcggcagtctcggctactgtttagtcaagctggacccaccagcatgtctcttcaagctaaaaactggctgcctggaccttgctacagacaacagcgtctgtcaaagcaggcaaacgacaacaacaacagcaactttccctggactgcggctacaaagtatcatctaaatggccgggactcgttggttaatccaggaccagctatggccagccacaaagacgatgaagaaaagtttttccccatgcatggaaccctgatatttggtaaacaaggaacaaatgctaacgacgcggatttggacaatgtcatgattacagatgaagaagaaatccgcaccaccaatcccgtggctacggagcagtacgggactgtgtcaaataatttgcaaaactcaaatactggtccaactactggaactgtcaatcaccaaggagcgttacctggtatggtgtggcaggatcgagacgtgtacctgcagggacccatttgggccaagattcctcacaccgatggacactttcatccttctccactgatgggaggttttggactcaaacacccgcctcctcagatcatgatcaaaaacactcccgttccagccaatcctcctacaaacttcagttctgccaagtttgcttccttcatcacacagtattccacgggacaagtcagcgtggagattgagtgggagctgcagaaggagaacagcaaacgctggaaccccgagatccagtacacttccaactacaacaaatctgttaatgtggactttactgtggacactaatggcgtgtattcagagcctcgccccattggcaccagatacctgactcgtaatctgtaa

SEQ ID NO: 4529 - DNA, 2208 bp, Artificial Sequence
  Description of Artificial Sequence: Synthetic polynucleotide
atggctgccgatggttatcttccagattggctcgaggacactctctctgaaggaataagacagtggtggaagctcaaacctggcccaccaccgccaaagcccgcagagcggcacaaggacgacagtaggggtcttgtgcttcctgggtacaagtacctcggacccttcaacggactcgacaaaggagagccggtcaacgaggcagacgccgcggccctcgagcacgacaaggcctacgaccggcagctcgacagcggagacaacccgtacctcaagtacaaccacgccgacgcggagtttcaggagcgtcttaaagaagatacgtcttttgggggcaacctcggacgagcagtattccaggcgaaaaagagggttcttgaacctctgggcctggttgaggagcctgttaagacggctccgggaaaaaagaggccggtagagcactctcctgtggagccagactcctcctcgggaaccggaaaagcgggccagcagcctgcaagaaaaagattgaattttggtcagactggagacgcagactccgtacctgacccccagcctctcggacagccaccagcagcccccacaagtttgggatctactacaatggctacaggcagtggcgcaccaatggcagacaataacgagggtgccgatggagtgggtaattcctcaggaaattggcattgcgattcccaatggctgggcgacagagtcatcaccaccagcacccgaacctgggccctgcccacctacaacaaccacctctacaagcaaatctccagccaatcaggagcatcgaacgacaaccactactttggccacagcaccccttgggggtattttgacttcaacagattccactgtcacttctccccacgtgactggcaaagactcatcaacaacaactggggattccgacccaagagactcaacttcaagctctttaacattcaagtcaaagaggtcacgcagaatgacggtacgacgacgattgccaataaccttaccagcacggttcaggtgtttactgactcggagtaccagctcccgtacgtcctcggctcggcgcatcaaggatgcctcccgccgttcccagcagacgtcttcatggtcccacagtatggatacctcaccctgaacaacgggagtcaggcggtaggacgctcttccttttactgcctggagtactttccttctcagatgcttcgtaccggaaacaactttaccttcagctacacctttgaagacgtgcctttccacagtagctacgctcacagccagagtctggatcggctgatgaatcctcttatcgaccagtacctgtattatctaaacaaaacacaatcaaatagtggaactcttcagcagtctcggctactgtttagtcaagctggacccaccagcatgtctcttcaagctaaaaactggctgcctggaccttgctacagacaacagcgtctgtcaaagcaggcaaacgacaacaacaacagcaactttccctggactgcggctacaaagtatcatctaaatggccgggactcgttggttaatccaggaccagctatggccagccacaaagacgatgaagaaaagtttttccccatgcatggaaccctgatatttggtaaacaaggaacaaatgctaacgacgcggatttggacaatgtcatgattacagatgaagaagaaatccgcaccaccaatcccgtggctacggagcagtacgggactgtgtcaaataatttgcaaaactcaaatactggtccaactactggaactgtcaatcgccaaggagcgttacctggtatggtgtggcaggatcgagacgtgtacctgcagggacccatttgggccaagattcctcacaccgatggacactttcatccttctccactgatgggaggttttggactcaaacacccgcctcctcagatcatgatcaaaaacactcccgttccagccaatcctcctacaaacttcagttctgccaagtttgcttccttcatcacacagtattccacgggacaagtcagcgtggagattgagtgggagctgcagaaggagaacagcaaacgctggaaccccgagatccagtacacttccaactacaacaaatctgttaatgtggactttactgtggacactaatggcgtgtattcagagcctcgccccattggcaccagatacctgactcgtaatctgtaa

SEQ ID NO: 4530 - DNA, 2208 bp, Artificial Sequence
  Description of Artificial Sequence: Synthetic polynucleotide
atggctgccgatggttatcttccagattggctcgaggacactctctctgaaggaataagacagtggtggaagctcaaacctggcccaccaccgccaaagcccgcagagcggcacaaggacgacagtaggggtcttgtgcttcctgggtacaagtacctcggacccttcaacggactcgacaaaggagagccggtcaacgaggcagacgccgcggccctcgagcacgacaaggcctacgaccggcagctcgacagcggagacaacccgtacctcaagtacaaccacgccgacgcggagtttcaggagcgtcttaaagaagatacgtcttttgggggcaacctcggacgagcagtattccaggcgaaaaagagggttcttgaacctctgggcctggttgaggagcctgttaagacggctccgggaaaaaagaggccggtagagcactctcctgtggagccagactcctcctcgggaaccggaaaagcgggccagcagcctgcaagaaaaagattgaattttggtcagactggagacgcagactccgtacctgacccccagcctctcggacagccaccagcagcccccacaagtttgggatctactacaatggctacaggcagtggcgcaccaatggcagacaataacgagggtgccgatggagtgggtaattcctcaggaaattggcattgcgattcccaatggctgggcgacagagtcatcaccaccagcacccgaacctgggccctgcccacctacaacaaccacctctacaagcaaatctccagccaatcaggagcatcgaacgacaaccactactttggccacagcaccccttgggggtattttgacttcaacagattccactgtcacttctccccacgtgactggcaaagactcatcaacaacaactggggattccgacccaagagactcaacttcaagctctttaacattcaagtcaaagaggtcacgcagaatgacggtacgacgacgattgccaataaccttaccagcacggttcaggtgtttactgactcggagtaccagctcccgtacgtcctcggctcggcgcatcaaggatgcctcccgccgttcccagcagacgtcttcatggtcccacagtatggatacctcaccctgaacaacgggagtcaggcggtaggacgctcttccttttactgcctggagtactttccttctcagatgcttcgtaccggaaacaactttaccttcagctacacctttgaagacgtgcctttccacagtagctacgctcacagccagagtctggatcggctgatgaatcctcttatcgaccagtacctgtattatctaaacaaaacacaatcaaatagtggaactcttcagcagtctcggctactgtttagtcaagctggacccaccagcatgtctcttcaagctaaaaactggctgcctggaccttgctacagacaacagcgtctgtcaaagcaggcaaacgacaacaacaacggcaactttccctggactgcggctacaaagtatcatctaaatggccgggactcgttggttaatccaggaccagctatggccagccacaaagacgatgaagaaaagtttttccccatgcatggaaccctgatatttggtaaacaaggaacaaatgctaacgacgcggatttggacaatgtcatgattacagatgaagaagaaatccgcaccaccaatcccgtggctacggagcagtacgggactgtgtcaaataatttgcaaaactcaaatactggtccaactactggaactgtcaatcaccaaggagcgttacctggtatggtgtggcaggatcgagacgtgtacctgcagggacccatttgggccaagattcctcacaccgatggacactttcatccttctccactgatgggaggttttggactcaaacacccgcctcctcagatcatgatcaaaaacactcccgttccagccaatcctcctacaaacttcagttctgccaagtttgcttccttcatcacacagtattccacgggacaagtcagcgtggagattgagtgggagctgcagaaggagaacagcaaacgctggaaccccgagatccagtacacttccaactacaacaaatctgttaatgtggactttactgtggacactaatggcgtgtattcagagcctcgccccattggcaccagatacctgactcgtaatctgtaa

SEQ ID NO: 4531 - DNA, 2208 bp, Artificial Sequence
  Description of Artificial Sequence: Synthetic polynucleotide
atggctgccgatggttatcttccagattggctcgaggacactctctctgaaggaataagacagtggtggaagctcaaacctggcccaccaccgccaaagcccgcagagcggcacaaggacgacagtaggggtcttgtgcttcctgggtacaagtacctcggacccttcaacggactcgacaaaggagagccggtcaacgaggcagacgccgcggccctcgagcacgacaaggcctacgaccggcagctcgacagcggagacaacccgtacctcaagtacaaccacgccgacgcggagtttcaggagcgtcttaaagaagatacgtcttttgggggcaacctcggacgagcagtattccaggcgaaaaagagggttcttgaacctctgggcctggttgaggagcctgttaagacggctccgggaaaaaagaggccggtagagcactctcctgtggagccagactcctcctcgggaaccggaaaagcgggccagcagcctgcaagaaaaagattgaattttggtcagactggagacgcagactccgtacctgacccccagcctctcggacagccaccagcagcccccacaagtttgggatctactacaatggctacaggcagtggcgcaccaatggcagacaataacgagggtgccgatggagtgggtaattcctcaggaaattggcattgcgattcccaatggctgggcgacagagtcatcaccaccagcacccgaacctgggccctgcccacctacaacaaccacctctacaagcaaatctccagccaatcaggagcatcgaacgacaaccactactttggccacagcaccccttgggggtattttgacttcaacagattccactgtcacttctccccacgtgactggcaaagactcatcaacaacaactggggattccgacccaagagactcaacttcaagctctttaacattcaagtcaaagaggtcacgcagaatgacggtacgacgacgattgccaataaccttaccagcacggttcaggtgtttactgactcggagtaccagctcccgtacgtcctcggctcggcgcatcaaggatgcctcccgccgttcccagcagacgtcttcatggtcccacagtatggatacctcaccctgaacaacgggagtcaggcggtaggacgctcttccttttactgcctggagtactttccttctcagatgcttcgtaccggaaacaactttaccttcagctacacctttgaagacgtgcctttccacagtagctacgctcacagccagagtctggatcggctgatgaatcctcttatcgaccagtacctgtattatctaaacaaaacacaatcaaatagtggaactcttcagcagtctcggctactgtttagtcaagctggacccaccagcatgtctcttcaagctaaaaactggctgcctggaccttgctacagacaacagcgtctgtcaaagcaggcaaacgacaacaacaacagcaactttccctggactgcggctacaaagtatcatctaaatggccgggactcgttggttaatccaggaccagctatggccagccacaaagacgatgaagaaaagtttttccccatgcatggaaccctgatatttggtaaacaaggaacaaatgctaacgacgcggatttggacaatgtcatgattacagatgaagaagaaatccgcaccaccaatcccgtggctacggagcagtacgggactgtgtcaaataatttgcaaaactcaaatactggtccaactactggaactgtcaatcaccaaggagcgttacctggtatggtgtggcaggatcgagacgtgtacctgcagggacccatttgggccaagattcctcacaccgatggacactttcatccttctccactgatgggaggttttggactcaaacacccgcctcctcagatcatgatcaaaaacactcccgttccagccaatcctcctacaaacttcagttctgccaagtttgcttccttcatcacacagtattccacgggacaagtcagcgtggagattgagtgggagctgcagaaggagaacggcaaacgctggaaccccgagatccagtacacttccaactacaacaaatctgttaatgtggactttactgtggacactaatggcgtgtattcagagcctcgccccattggcaccagatacctgactcgtaatctgtaa

SEQ ID NO: 4532 - DNA, 2208 bp, Artificial Sequence
  Description of Artificial Sequence: Synthetic polynucleotide
atggctgccgatggttatcttccagattggctcgaggacgctctctctgaaggaataagacagtggtggaagctcaaacctggcccaccaccgccaaagcccgcagagcggcacaaggacgacagtaggggtcttgtgcttcctgggtacaagtacctcggacccttcaacggactcgacaaaggagagccggtcaacgaggcagacgccgcggccctcgagcacgacaaggcctacgaccggcagctcgacagcggagacaacccgtacctcaagtacaaccacgccgacgcggagtttcaggagcgtcttaaagaagatacgtcttttgggggcaacctcggacgagcagtattccaggcgaaaaagagggttcttgaacctctgggcctggttgaggagcctgttaagacggctccgggaaaaaagaggccggtagagcactctcctgtggagccagactcctcctcgggaaccggaaaagcgggccagcagcctgcaagaaaaagattgaattttggtcagactggagacgcagactccgtacctgacccccagcctctcggacagccaccagcagcccccacaagtttgggatctactacaatggctacaggcagtggcgcaccaatggcagacaataacgagggtgccgatggagtgggtaattcctcaggaaattggcattgcgattcccaatggctgggcgacagagtcatcaccaccagcacccgaacctgggccctgcccacctacaacaaccacctctacaagcaaatctccagccaatcaggagcatcgaacgacaaccactactttggccacagcaccccttgggggtattttgacttcaacagattccactgtcacttctccccacgtgactggcaaagactcatcaacaacaactggggattccgacccaagagactcaacttcaagctctttaacattcaagtcaaagaggtcacgcagaatgacggtacgacgacgattgccaataaccttaccagcacggttcaggtgtttactgactcggagtaccagctcccgtacgtcctcggctcggcgcatcaaggatgcctcccgccgttcccagcagacgtcttcatggtcccacagtatggatacctcaccctgaacaacgggagtcaggcggtaggacgctcttccttttactgcctggagtactttccttctcagatgcttcgtaccggaaacaactttaccttcagctacacctttgaagacgtgcctttccacagtagctacgctcacagccagagtctggatcggctgatgaatcctcttatcgaccagtacctgtattatctaaacaaaacacaatcaaatagtggaactcttcagcagtctcggctactgtttagtcaagctggacccaccagcatgtctcttcaagctaaaaactggctgcctggaccttgctacagacaacagcgtctgtcaaagcaggcaaacgacaacaacaacagcaactttccctggactgcggctacaaagtatcatctaaatggccgggactcgttggttaatccaggaccagctatggccagccacaaagacgatgaagaaaagtttttccccatgcatggaaccctgatatttggtaaacaaggaacaaatgctaacgacgcggatttggacaatgtcatgattacagatgaagaagaaatccgcaccaccaatcccgtggctacggagcagtacgggactgtgtcaaataatttgcaaaactcaaatactggtccaactactggaactgtcaatcaccaaggagcgttacctggtatggtgtggcaggatcgagacgtgtacctgcagggacccatttgggccaagattcctcacaccgatggacactttcatccttctccactgatgggaggttttggactcaaacacccgcctcctcagatcatgatcaaaaacactcccgttccagccaatcctcctacaaacttcagttctgccaagtttgcttccttcatcacacagtattccacgggacaagtcagcgtggagattgagtgggagctgcagaaggagaacagcaaacgctggaaccccgagatccagtacacttccaactacaacaaatctgttaatgtggactttactgtggacactaatggcgtgtattcagagcctcgccccattggcaccagatacctgactcgtaatctgtaa

SEQ ID NO: 4533 - DNA, 2208 bp, Artificial Sequence
  Description of Artificial Sequence: Synthetic polynucleotide
atggctgccgatggttatcttccagattggctcgaggacactctctctgaaggaataagacagtggtggaagctcaaacctggcccaccaccgccaaagcccgcagagcggcacaaggacgacagtaggggtcttgtgcttcctgggtacaagtacctcggacccttcaacggactcgacaaaggagagccggtcaacgaggcagacgccgcggccctcgagcacgacaaggcctacgaccggcagctcgacagcggagacaacccgtacctcaagtacaaccacgccgacgcggagtttcaggagcgtcttaaagaagatacgccttttgggggcaacctcggacgagcagtattccaggcgaaaaagagggttcttgaacctctgggcctggttgaggagcctgttaagacggctccgggaaaaaagaggccggtagagcactctcctgtggagccagactcctcctcgggaaccggaaaagcgggccagcagcctgcaagaaaaagattgaattttggtcagactggagacgcagactccgtacctgacccccagcctctcggacagccaccagcagcccccacaagtttgggatctactacaatggctacaggcagtggcgcaccaatggcagacaataacgagggtgccgatggagtgggtaattcctcaggaaattggcattgcgattcccaatggctgggcgacagagtcatcaccaccagcacccgaacctgggccctgcccacctacaacaaccacctctacaagcaaatctccagccaatcaggagcatcgaacgacaaccactactttggccacagcaccccttgggggtattttgacttcaacagattccactgtcacttctccccacgtgactggcaaagactcatcaacaacaactggggattccgacccaagagactcaacttcaagctctttaacattcaagtcaaagaggtcacgcagaatgacggtacgacgacgattgccaataaccttaccagcacggttcaggtgtttactgactcggagtaccagctcccgtacgtcctcggctcggcgcatcaaggatgcctcccgccgttcccagcagacgtcttcatggtcccacagtatggatacctcaccctgaacaacgggagtcaggcggtaggacgctcttccttttactgcctggagtactttccttctcagatgcttcgtaccggaaacaactttaccttcagctacacctttgaagacgtgcctttccacagtagctacgctcacagccagagtctggatcggctgatgaatcctcttatcgaccagtacctgtattatctaaacaaaacacaatcaaatagtggaactcttcagcagtctcggctactgtttagtcaagctggacccaccagcatgtctcttcaagctaaaaactggctgcctggaccttgctacagacaacagcgtctgtcaaagcaggcaaacgacaacaacaacagcaactttccctggactgcggctacaaagtatcatctaaatggccgggactcgttggttaatccaggaccagctatggccagccacaaagacgatgaagaaaagtttttccccatgcatggaaccctgatatttggtaaacaaggaacaaatgctaacgacgcggatttggacaatgtcatgattacagatgaagaagaaatccgcaccaccaatcccgtggctacggagcagtacgggactgtgtcaaataatttgcaaaactcaaatactggtccaactactggaactgtcaatcaccaaggagcgttacctggtatggtgtggcaggatcgagacgtgtacctgcagggacccatttgggccaagattcctcacaccgatggacactttcatccttctccactgatgggaggttttggactcaaacacccgcctcctcagatcatgatcaaaaacactcccgttccagccaatcctcctacaaacttcagttctgccaagtttgcttccttcatcacacagtattccacgggacaagtcagcgtggagattgagtgggagctgcagaaggagaacagcaaacgctggaaccccgagatccagtacacttccaactacaacaaatctgttaatgtggactttactgtggacactaatggcgtgtattcagagcctcgccccattggcaccagatacctgactcgtaatctgtaa

SEQ ID NO: 4534 - protein, 743 aa, Artificial Sequence
  Description of Artificial Sequence: Synthetic polypeptide
MAADGYLPDWLEDNLSEGIREWWALKPGAPQPKANQQHQDNARGLVLPGYKYLGPGNGLDKGEPVNAADAAALEHDKAYDQQLKAGDNPYLKYNHADAEFQERLKEDTSFGGNLGRAVFQAKKRLLEPLGLVEEAAKTAPGKKRPVEQSPQEPDSSAGIGKSGAQPAKKRLNFGQTGDTESVPDPQPIGEPPAAPSGVGSLTMASGGGAPVADNNEGADGVGSSSGNWHCDSQWLGDRVITTSTRTWALPTYNNHLYKQISNSTSGGSSNDNAYFGYSTPWGYFDFNRFHCHFSPRDWQRLINNNWGFRPKRLNFKLFNIQVKEVTDNNGVKTIANNLTSTVQVFTDSDYQLPYVLGSAHEGCLPPFPADVFMIPQYGYLTLNDGSQAVGRSSFYCLEYFPSQMLRTGNNFQFSYEFENVPFHSSYAHSQSLDRLMNPLIDQYLYYLSKTINGSGQNQQTLKFSVAGPSNMAVQGRNYIPGPSYRQQRVSTTVTQNNNSEFAWPGASSWALNGRNSLMNPGPAMASHKEGEDRFFPLSGSLIFGKQGTGRDNVDADKVMITNEEEIKTTNPVATESYGQVATNHQSAQTLAVPFKAQAQTGWVQNQGILPGMVWQDRDVYLQGPIWAKIPHTDGNFHPSPLMGGFGMKHPPPQILIKNTPVPADPPTAFNKDKLNSFITQYSTGQVSVEIEWELQKENSKRWNPEIQYTSNYYKSNNVEFAVNTEGVYSEPRPIGTRYLTRNL

SEQ ID NO: 4535 - protein, 5 aa, Artificial Sequence
  Description of Artificial Sequence: Synthetic peptide
GGGGS

SEQ ID NO: 4536 - protein, 6 aa, Artificial Sequence
  Description of Artificial Sequence: Synthetic peptide
SGGGGS

SEQ ID NO: 4537 - protein, 15 aa, Artificial Sequence
  Description of Artificial Sequence: Synthetic peptide
GGGGSGGGGSGGGGS

SEQ ID NO: 4538 - protein, 25 aa, Artificial Sequence
  Description of Artificial Sequence: Synthetic peptide
GGGGSGGGGSGGGGSGGGGSGGGGS

SEQ ID NO: 4539 - protein, 10 aa, Artificial Sequence
  Description of Artificial Sequence: Synthetic peptide
GGGGSGGGGS

SEQ ID NO: 4540 - protein, 20 aa, Artificial Sequence
  Description of Artificial Sequence: Synthetic peptide
GGGGSGGGGSGGGGSGGGGS

SEQ ID NO: 4541 - protein, 30 aa, Artificial Sequence
  Description of Artificial Sequence: Synthetic polypeptide
GGGGSGGGGSGGGGSGGGGSGGGGSGGGGS

SEQ ID NO: 4542 - protein, 40 aa, Artificial Sequence
  Description of Artificial Sequence: Synthetic polypeptide
GGGGSGGGGSGGGGSGGGGSGGGGSGGGGSGGGGSGGGGS

SEQ ID NO: 4543 - DNA, 11 bp, Artificial Sequence
  Description of Artificial Sequence: Synthetic oligonucleotide
gaggagccacc

SEQ ID NO: 4544 - protein, 50 aa, Artificial Sequence
  Description of Artificial Sequence: Synthetic polypeptide
  MISC_FEATURE (1)..(50): This sequence may encompass 1-10 "Gly Gly Gly Gly Ser" repeating units
GGGGSGGGGSGGGGSGGGGSGGGGSGGGGSGGGGSGGGGSGGGGSGGGGS

SEQ ID NO: 4545 - protein, 4 aa, Unknown
  Description of Unknown: "KDEL" ER retention motif
KDEL

SEQ ID NO: 4546 - protein, 6 aa, Unknown
  Description of Unknown: "SEKDEL" ER retention motif
SEKDEL

SEQ ID NO: 4547 - DNA, 4010 bp, Artificial Sequence
  Description of Artificial Sequence: Synthetic polynucleotide
ctgcgcgctcgctcgctcactgaggccgcccgggcaaagcccgggcgtcgggcgacctttggtcgcccggcctcagtgagcgagcgagcgcgcagagagggagtggccaactccatcactaggggttccttgtagttaatgattaacccgccatgctacttatctaccagggtaatggggatcctctagaactatagctagtcgacataacgcgtctagttattaatagtaatcaattacggggtcattagttcatagcccatatatggagttccgcgttacataacttacggtaaatggcccgcctggctgaccgcccaacgacccccgcccattgacgtcaataatgacgtatgttcccatagtaacgccaatagggactttccattgacgtcaatgggtggagtatttacggtaaactgcccacttggcagtacatcaagtgtatcatatgccaagtacgccccctattgacgtcaatgacggtaaatggcccgcctggcattatgcccagtacatgaccttatgggactttcctacttggcagtacatctacgtattagtcatcgctattaccatggtcgaggtgagccccacgttctgcttcactctccccatctcccccccctccccacccccaattttgtatttatttattttttaattattttgtgcagcgatgggggcggggggggggggggggcgcgcgccaggcggggcggggcggggcgaggggcggggcggggcgaggcggagaggtgcggcggcagccaatcagagcggcgcgctccgaaagtttccttttatggcgaggcggcggcggcggcggccctataaaaagcgaagcgcgcggcgggcgggagtcgctgcgcgctgccttcgccccgtgccccgctccgccgccgcctcgcgccgcccgccccggctctgactgaccgcgttactcccacaggtgagcgggcgggacggcccttctcctccgggctgtaattagcgcttggtttaatgacggcttgtttcttttctgtggctgcgtgaaagccttgaggggctccgggagggccctttgtgcggggggagcggctcggggggtgcgtgcgtgtgtgtgtgcgtggggagcgccgcgtgcggctccgcgctgcccggcggctgtgagcgctgcgggcgcggcgcggggctttgtgcgctccgcagtgtgcgcgaggggagcgcggccgggggcggtgccccgcggtgcggggggggctgcgaggggaacaaaggctgcgtgcggggtgtgtgcgtgggggggtgagcagggggtgtgggcgcgtcggtcgggctgcaaccccccctgcacccccctccccgagttgctgagcacggcccggcttcgggtgcggggctccgtacggggcgtggcgcggggctcgccgtgccgggcggggggtggcggcaggtgggggtgccgggcggggcggggccgcctcgggccggggagggctcgggggaggggcgcggcggcccccggagcgccggcggctgtcgaggcgcggcgagccgcagccattgccttttatggtaatcgtgcgagagggcgcagggacttcctttgtcccaaatctgtgcggagccgaaatctgggaggcgccgccgcaccccctctagcgggcgcggggcgaagcggtgcggcgccggcaggaaggaaatgggcggggagggccttcgtgcgtcgccgcgccgccgtccccttctccctctccagcctcggggctgtccgcggggggacggctgccttcgggggggacggggcagggcggggttcggcttctggcgtgtgaccggcggctctagagcctctgctaaccatgttcatgccttcttctttttcctacagctcctgggcaacgtgctggttattgtgctgtctcatcattttggcaaagaattcgagctccttcctactcaaagccacatgaataggaggagccaccatgggatggagctggatctttctctttctcctgtcaggaactacaggtgtcctctctgaggtccagctgcaacagtctggacctgagctggtgaagcctggggcttcagtgaagatatcctgcaagacttctggatacacattcactgaatacaccatacactgggtgaagcagagccatggagagagccttgagtggattggaggtattaatccaaacgatggtggtactatttacaaccagaagttcaagggcaaggccacattgactgtagacaagtcctccaaaacagcctacatggagctccgcagcctgacatctgaggattctgcagtcttttactgtgcaagagggccctccgccaggtttccttactggggccaagggactctggtcactgtctctgcagccaaaacgacacccccatctgtctatccactggcccctggatctgctgcccaaactaactccatggtgaccctgggatgcctggtcaagggctatttccctgagccagtgacagtgacctggaactctggatccctgtccagcggtgtgcacaccttcccagctgtcctgcagtctgacctctacactctgagcagctcagtgactgtcccctccagcacctggcccagcgagaccgtcacctgcaacgttgcccacccggccagcagcaccaaggtggacaagaaaattgtgcccagggattgtggtgagctcaaaaccccacttggtgacacaactcacacatgcccacggtgcccagagcccaaatcttgtgacacacctcccccgtgcccacggtgcccagagcccaaatcttgtgacacaactcacacatgcccacggtgcccagagcccaaatcttgtgacacacctcccccgtgcccaaggtgcccagcacctgaactcagaaagaggcgagagggcagaggaagtcttctaacatgcggtgacgtggaggagaatcccggccctatgatgagtcctgcccagttcctgtttctgttagtgctctggattcgggaaaccaacggtgatgttgtgatgacccagactccactcactttgtcggttaccattggacaaccagcctccatctcttgcaagtcaagtcagagcctcttagatagtgatggaaagacatatttgaattggttgttacagaggccaggccagtctccaaagcgcctaatctatctggtgtctaaactggactctggagtccctgacagattcactggcagtggatcagggacagatttcacactgaaaattagcagagtggaggctgaggatttgggagtttattattgctggcaaggtacacattttcctcggacgttcggtggaggcaccaagctggaaatcaaacgggctgatgctgcaccaactgtatccatcttcccaccatccagtgagcagttaacatctggaggtgcctcagtcgtgtgcttcttgaacaacttctaccccaaagacatcaatgtcaagtggaagattgatggcagtgaacgacaaaatggcgtcctgaacagttggactgatcaggacagcaaagacagcacctacagcatgagcagcaccctcacgttgaccaaggacgagtatgaacgacataacagctatacctgtgaggccactcacaagacatcaacttcacccattgtcaagagcttcaacaggaatgagtgttagtaactcgaggacggggtgaactacgcctgaggatccgatctttttccctctgccaaaaattatggggacatcatgaagccccttgagcatctgacttctggctaataaaggaaatttattttcattgcaatagtgtgttggaattttttgtgtctctcactcggcctaggtagataagtagcatggcgggttaatcattaactacaaggaacccctagtgatggagttggccactccctctctgcgcgctcgctcgctcactgaggccgggcgaccaaaggtcgcccgacgcccgggctttgcccgggcggcctcagtgagcgagcgagcgcgcag

SEQ ID NO: 4548 - DNA, 3812 bp, Artificial Sequence
  Description of Artificial Sequence: Synthetic polynucleotide
ctgcgcgctcgctcgctcactgaggccgcccgggcaaagcccgggcgtcgggcgacctttggtcgcccggcctcagtgagcgagcgagcgcgcagagagggagtggccaactccatcactaggggttccttgtagttaatgattaacccgccatgctacttatctaccagggtaatggggatcctctagaactatagctagtcgacataacgcgtctagttattaatagtaatcaattacggggtcattagttcatagcccatatatggagttccgcgttacataacttacggtaaatggcccgcctggctgaccgcccaacgacccccgcccattgacgtcaataatgacgtatgttcccatagtaacgccaatagggactttccattgacgtcaatgggtggagtatttacggtaaactgcccacttggcagtacatcaagtgtatcatatgccaagtacgccccctattgacgtcaatgacggtaaatggcccgcctggcattatgcccagtacatgaccttatgggactttcctacttggcagtacatctacgtattagtcatcgctattaccatggtcgaggtgagccccacgttctgcttcactctccccatctcccccccctccccacccccaattttgtatttatttattttttaattattttgtgcagcgatgggggcggggggggggggggggcgcgcgccaggcggggcggggcggggcgaggggcggggcggggcgaggcggagaggtgcggcggcagccaatcagagcggcgcgctccgaaagtttccttttatggcgaggcggcggcggcggcggccctataaaaagcgaagcgcgcggcgggcgggagtcgctgcgcgctgccttcgccccgtgccccgctccgccgccgcctcgcgccgcccgccccggctctgactgaccgcgttactcccacaggtgagcgggcgggacggcccttctcctccgggctgtaattagcgcttggtttaatgacggcttgtttcttttctgtggctgcgtgaaagccttgaggggctccgggagggccctttgtgcggggggagcggctcggggggtgcgtgcgtgtgtgtgtgcgtggggagcgccgcgtgcggctccgcgctgcccggcggctgtgagcgctgcgggcgcggcgcggggctttgtgcgctccgcagtgtgcgcgaggggagcgcggccgggggcggtgccccgcggtgcggggggggctgcgaggggaacaaaggctgcgtgcggggtgtgtgcgtgggggggtgagcagggggtgtgggcgcgtcggtcgggctgcaaccccccctgcacccccctccccgagttgctgagcacggcccggcttcgggtgcggggctccgtacggggcgtggcgcggggctcgccgtgccgggcggggggtggcggcaggtgggggtgccgggcggggcggggccgcctcgggccggggagggctcgggggaggggcgcggcggcccccggagcgccggcggctgtcgaggcgcggcgagccgcagccattgccttttatggtaatcgtgcgagagggcgcagggacttcctttgtcccaaatctgtgcggagccgaaatctgggaggcgccgccgcaccccctctagcgggcgcggggcgaagcggtgcggcgccggcaggaaggaaatgggcggggagggccttcgtgcgtcgccgcgccgccgtccccttctccctctccagcctcggggctgtccgcggggggacggctgccttcgggggggacggggcagggcggggttcggcttctggcgtgtgaccggcggctctagagcctctgctaaccatgttcatgccttcttctttttcctacagctcctgggcaacgtgctggttattgtgctgtctcatcattttggcaaagaattcgagctccttcctactcaaagccacatgaataggaggagccaccatgggatggagctggatctttctctttctcctgtcaggaactacaggtgtcctctctgaggtccagctgcaacagtctggacctgagctggtgaagcctggggcttcagtgaagatatcctgcaagacttctggatacacattcactgaatacaccatacactgggtgaagcagagccatggagagagccttgagtggattggaggtattaatccaaacgatggtggtactatttacaaccagaagttcaagggcaaggccacattgactgtagacaagtcctccaaaacagcctacatggagctccgcagcctgacatctgaggattctgcagtcttttactgtgcaagagggccctccgccaggtttccttactggggccaagggactctggtcactgtctctgcagccaaaacgacacccccatctgtctatccactggcccctggatctgctgcccaaactaactccatggtgaccctgggatgcctggtcaagggctatttccctgagccagtgacagtgacctggaactctggatccctgtccagcggtgtgcacaccttcccagctgtcctgcagtctgacctctacactctgagcagctcagtgactgtcccctccagcacctggcccagcgagaccgtcacctgcaacgttgcccacccggccagcagcaccaaggtggacaagaaaattgtgcccagggattgtggtagaaagaggcgagagggcagaggaagtcttctaacatgcggtgacgtggaggagaatcccggccctatgatgagtcctgcccagttcctgtttctgttagtgctctggattcgggaaaccaacggtgatgttgtgatgacccagactccactcactttgtcggttaccattggacaaccagcctccatctcttgcaagtcaagtcagagcctcttagatagtgatggaaagacatatttgaattggttgttacagaggccaggccagtctccaaagcgcctaatctatctggtgtctaaactggactctggagtccctgacagattcactggcagtggatcagggacagatttcacactgaaaattagcagagtggaggctgaggatttgggagtttattattgctggcaaggtacacattttcctcggacgttcggtggaggcaccaagctggaaatcaaacgggctgatgctgcaccaactgtatccatcttcccaccatccagtgagcagttaacatctggaggtgcctcagtcgtgtgcttcttgaacaacttctaccccaaagacatcaatgtcaagtggaagattgatggcagtgaacgacaaaatggcgtcctgaacagttggactgatcaggacagcaaagacagcacctacagcatgagcagcaccctcacgttgaccaaggacgagtatgaacgacataacagctatacctgtgaggccactcacaagacatcaacttcacccattgtcaagagcttcaacaggaatgagtgttagtaactcgaggacggggtgaactacgcctgaggatccgatctttttccctctgccaaaaattatggggacatcatgaagccccttgagcatctgacttctggctaataaaggaaatttattttcattgcaatagtgtgttggaattttttgtgtctctcactcggcctaggtagataagtagcatggcgggttaatcattaactacaaggaacccctagtgatggagttggccactccctctctgcgcgctcgctcgctcactgaggccgggcgaccaaaggtcgcccgacgcccgggctttgcccgggcggcctcagtgagcgagcgagcgcgcag

SEQ ID NO: 4549 - DNA, 3109 bp, Artificial Sequence
  Description of Artificial Sequence: Synthetic polynucleotide
ctgcgcgctcgctcgctcactgaggccgcccgggcaaagcccgggcgtcgggcgacctttggtcgcccggcctcagtgagcgagcgagcgcgcagagagggagtggccaactccatcactaggggttccttgtagttaatgattaacccgccatgctacttatctaccagggtaatggggatcctctagaactatagctagtcgacataacgcgtctagttattaatagtaatcaattacggggtcattagttcatagcccatatatggagttccgcgttacataacttacggtaaatggcccgcctggctgaccgcccaacgacccccgcccattgacgtcaataatgacgtatgttcccatagtaacgccaatagggactttccattgacgtcaatgggtggagtatttacggtaaactgcccacttggcagtacatcaagtgtatcatatgccaagtacgccccctattgacgtcaatgacggtaaatggcccgcctggcattatgcccagtacatgaccttatgggactttcctacttggcagtacatctacgtattagtcatcgctattaccatggtcgaggtgagccccacgttctgcttcactctccccatctcccccccctccccacccccaattttgtatttatttattttttaattattttgtgcagcgatgggggcggggggggggggggggcgcgcgccaggcggggcggggcggggcgaggggcggggcggggcgaggcggagaggtgcggcggcagccaatcagagcggcgcgctccgaaagtttccttttatggcgaggcggcggcggcggcggccctataaaaagcgaagcgcgcggcgggcgggagtcgctgcgcgctgccttcgccccgtgccccgctccgccgccgcctcgcgccgcccgccccggctctgactgaccgcgttactcccacaggtgagcgggcgggacggcccttctcctccgggctgtaattagcgcttggtttaatgacggcttgtttcttttctgtggctgcgtgaaagccttgaggggctccgggagggccctttgtgcggggggagcggctcggggggtgcgtgcgtgtgtgtgtgcgtggggagcgccgcgtgcggctccgcgctgcccggcggctgtgagcgctgcgggcgcggcgcggggctttgtgcgctccgcagtgtgcgcgaggggagcgcggccgggggcggtgccccgcggtgcggggggggctgcgaggggaacaaaggctgcgtgcggggtgtgtgcgtgggggggtgagcagggggtgtgggcgcgtcggtcgggctgcaaccccccctgcacccccctccccgagttgctgagcacggcccggcttcgggtgcggggctccgtacggggcgtggcgcggggctcgccgtgccgggcggggggtggcggcaggtgggggtgccgggcggggcggggccgcctcgggccggggagggctcgggggaggggcgcggcggcccccggagcgccggcggctgtcgaggcgcggcgagccgcagccattgccttttatggtaatcgtgcgagagggcgcagggacttcctttgtcccaaatctgtgcggagccgaaatctgggaggcgccgccgcaccccctctagcgggcgcggggcgaagcggtgcggcgccggcaggaaggaaatgggcggggagggccttcgtgcgtcgccgcgccgccgtccccttctccctctccagcctcggggctgtccgcggggggacggctgccttcgggggggacggggcagggcggggttcggcttctggcgtgtgaccggcggctctagagcctctgctaaccatgttcatgccttcttctttttcctacagctcctgggcaacgtgctggttattgtgctgtctcatcattttggcaaagaattcgagctccttcctactcaaagccacatgaataggaggagccaccatgggatggagctggatctttctctttctcctgtcaggaactacaggtgtcctctctgaggtccagctgcaacagtctggacctgagctggtgaagcctggggcttcagtgaagatatcctgcaagacttctggatacacattcactgaatacaccatacactgggtgaagcagagccatggagagagccttgagtggattggaggtattaatccaaacgatggtggtactatttacaaccagaagttcaagggcaaggccacattgactgtagacaagtcctccaaaacagcctacatggagctccgcagcctgacatctgaggattctgcagtcttttactgtgcaagagggccctccgccaggtttccttactggggccaagggactctggtcactgtctctgcaggtggtggtggtagcggcggcggcggctctggtggtggtggatccgatgttgtgatgacccagactccactcactttgtcggttaccattggacaaccagcctccatctcttgcaagtcaagtcagagcctcttagatagtgatggaaagacatatttgaattggttgttacagaggccaggccagtctccaaagcgcctaatctatctggtgtctaaactggactctggagtccctgacagattcactggcagtggatcagggacagatttcacactgaaaattagcagagtggaggctgaggatttgggagtttattattgctggcaaggtacacattttcctcggacgttcggtggaggcaccaagctggaaatcaaacggtacccatacgatgttccagattacgcttagtgacctgaggatccgatctttttccctctgccaaaaattatggggacatcatgaagccccttgagcatctgacttctggctaataaaggaaatttattttcattgcaatagtgtgttggaattttttgtgtctctcactcggcctaggtagataagtagcatggcgggttaatcattaactacaaggaacccctagtgatggagttggccactccctctctgcgcgctcgctcgctcactgaggccgggcgaccaaaggtcgcccgacgcccgggctttgcccgggcggcctcagtgagcgagcgagcgcgcag

SEQ ID NO: 4550 - DNA, 3115 bp, Artificial Sequence
  Description of Artificial Sequence: Synthetic polynucleotide
ctgcgcgctcgctcgctcactgaggccgcccgggcaaagcccgggcgtcgggcgacctttggtcgcccggcctcagtgagcgagcgagcgcgcagagagggagtggccaactccatcactaggggttccttgtagttaatgattaacccgccatgctacttatctaccagggtaatggggatcctctagaactatagctagtcgacataacgcgtctagttattaatagtaatcaattacggggtcattagttcatagcccatatatggagttccgcgttacataacttacggtaaatggcccgcctggctgaccgcccaacgacccccgcccattgacgtcaataatgacgtatgttcccatagtaacgccaatagggactttccattgacgtcaatgggtggagtatttacggtaaactgcccacttggcagtacatcaagtgtatcatatgccaagtacgccccctattgacgtcaatgacggtaaatggcccgcctggcattatgcccagtacatgaccttatgggactttcctacttggcagtacatctacgtattagtcatcgctattaccatggtcgaggtgagccccacgttctgcttcactctccccatctcccccccctccccacccccaattttgtatttatttattttttaattattttgtgcagcgatgggggcggggggggggggggggcgcgcgccaggcggggcggggcggggcgaggggcggggcggggcgaggcggagaggtgcggcggcagccaatcagagcggcgcgctccgaaagtttccttttatggcgaggcggcggcggcggcggccctataaaaagcgaagcgcgcggcgggcgggagtcgctgcgcgctgccttcgccccgtgccccgctccgccgccgcctcgcgccgcccgccccggctctgactgaccgcgttactcccacaggtgagcgggcgggacggcccttctcctccgggctgtaattagcgcttggtttaatgacggcttgtttcttttctgtggctgcgtgaaagccttgaggggctccgggagggccctttgtgcggggggagcggctcggggggtgcgtgcgtgtgtgtgtgcgtggggagcgccgcgtgcggctccgcgctgcccggcggctgtgagcgctgcgggcgcggcgcggggctttgtgcgctccgcagtgtgcgcgaggggagcgcggccgggggcggtgccccgcggtgcggggggggctgcgaggggaacaaaggctgcgtgcggggtgtgtgcgtgggggggtgagcagggggtgtgggcgcgtcggtcgggctgcaaccccccctgcacccccctccccgagttgctgagcacggcccggcttcgggtgcggggctccgtacggggcgtggcgcggggctcgccgtgccgggcggggggtggcggcaggtgggggtgccgggcggggcggggccgcctcgggccggggagggctcgggggaggggcgcggcggcccccggagcgccggcggctgtcgaggcgcggcgagccgcagccattgccttttatggtaatcgtgcgagagggcgcagggacttcctttgtcccaaatctgtgcggagccgaaatctgggaggcgccgccgcaccccctctagcgggcgcggggcgaagcggtgcggcgccggcaggaaggaaatgggcggggagggccttcgtgcgtcgccgcgccgccgtccccttctccctctccagcctcggggctgtccgcggggggacggctgccttcgggggggacggggcagggcggggttcggcttctggcgtgtgaccggcggctctagagcctctgctaaccatgttcatgccttcttctttttcctacagctcctgggcaacgtgctggttattgtgctgtctcatcattttggcaaagaattcgagctccttcctactcaaagccacatgaataggaggagccaccatgagtcctgcccagttcctgtttctgttagtgctctggattcgggaaaccaacggtgatgttgtgatgacccagactccactcactttgtcggttaccattggacaaccagcctccatctcttgcaagtcaagtcagagcctcttagatagtgatggaaagacatatttgaattggttgttacagaggccaggccagtctccaaagcgcctaatctatctggtgtctaaactggactctggagtccctgacagattcactggcagtggatcagggacagatttcacactgaaaattagcagagtggaggctgaggatttgggagtttattattgctggcaaggtacacattttcctcggacgttcggtggaggcaccaagctggaaatcaaacggggtggtggtggtagcggcggcggcggctctggtggtggtggatccgaggtccagctgcaacagtctggacctgagctggtgaagcctggggcttcagtgaagatatcctgcaagacttctggatacacattcactgaatacaccatacactgggtgaagcagagccatggagagagccttgagtggattggaggtattaatccaaacgatggtggtactatttacaaccagaagttcaagggcaaggccacattgactgtagacaagtcctccaaaacagcctacatggagctccgcagcctgacatctgaggattctgcagtcttttactgtgcaagagggccctccgccaggtttccttactggggccaagggactctggtcactgtctctgcatacccatacgatgttccagattacgcttagtgactcgagcctgaggatccgatctttttccctctgccaaaaattatggggacatcatgaagccccttgagcatctgacttctggctaataaaggaaatttattttcattgcaatagtgtgttggaattttttgtgtctctcactcggcctaggtagataagtagcatggcgggttaatcattaactacaaggaacccctagtgatggagttggccactccctctctgcgcgctcgctcgctcactgaggccgggcgaccaaaggtcgcccgacgcccgggctttgcccgggcggcctcagtgagcgagcgagcgcgcag

SEQ ID NO: 4551 - DNA, 3522 bp, Artificial Sequence
  Description of Artificial Sequence: Synthetic polynucleotide
ctgcgcgctcgctcgctcactgaggccgcccgggcaaagcccgggcgtcgggcgacctttggtcgcccggcctcagtgagcgagcgagcgcgcagagagggagtggccaactccatcactaggggttccttgtagttaatgattaacccgccatgctacttatctaccagggtaatggggatcctctagaactatagctagtcgacattgattattgactagttattaatagtaatcaattacggggtcattagttcatagcccatatatggagttccgcgttacataacttacggtaaatggcccgcctggctgaccgcccaacgacccccgcccattgacgtcaataatgacgtatgttcccatagtaacgccaatagggactttccattgacgtcaatgggtggagtatttacggtaaactgcccacttggcagtacatcaagtgtatcatatgccaagtacgccccctattgacgtcaatgacggtaaatggcccgcctggcattatgcccagtacatgaccttatgggactttcctacttggcagtacatctacgtattagtcatcgctattaccatgtcgaggccacgttctgcttcactctccccatctcccccccctccccacccccaattttgtatttatttattttttaattattttgtgcagcgatgggggcggggggggggggcgcgcgccaggcggggcggggcggggcgaggggcggggcggggcgaggcggagaggtgcggcggcagccaatcagagcggcgcgctccgaaagtttccttttatggcgaggcggcggcggcggcggccctataaaaagcgaagcgcgcggcgggcgggagcaagcttcgtttagtgaaccgtcagatcgcctggagacgccatccacgctgttttgacctccatagaagacaccgggaccgatccagcctccgcggattcgaatcccggccgggaacggtgcattggaacgcggattccccgtgccaagagtgacgtaagtaccgcctatagagtctataggcccacaaaaaatgctttcttcttttaatatacttttttgtttatcttatttctaatactttccctaatctctttctttcagggcaataatgatacaatgtatcatgcctctttgcaccattctaaagaataacagtgataatttctgggttaaggcaatagcaatatttctgcatataaatatttctgcatataaattgtaactgatgtaagaggtttcatattgctaatagcagctacaatccagctaccattctgcttttattttatggttgggataaggctggattattctgagtccaagctaggcccttttgctaatcatgttcatacctcttatcttcctcccacagctcctgggcaacgtgctggtctgtgtgctggcccatcactttggcaaagaattgagctccttcctactcaaagccacatgaataggaggagccaccatgggatggagctggatctttctctttctcctgtcaggaactacaggtgtcctctctgaggtccagctgcaacagtctggacctgagctggtgaagcctggggcttcagtgaagatatcctgcaagacttctggatacacattcactgaatacaccatacactgggtgaagcagagccatggagagagccttgagtggattggaggtattaatccaaacgatggtggtactatttacaaccagaagttcaagggcaaggccacattgactgtagacaagtcctccaaaacagcctacatggagctccgcagcctgacatctgaggattctgcagtcttttactgtgcaagagggccctccgccaggtttccttactggggccaagggactctggtcactgtctctgcagccaaaacgacacccccatctgtctatccactggcccctggatctgctgcccaaactaactccatggtgaccctgggatgcctggtcaagggctatttccctgagccagtgacagtgacctggaactctggatccctgtccagcggtgtgcacaccttcccagctgtcctgcagtctgacctctacactctgagcagctcagtgactgtcccctccagcacctggcccagcgagaccgtcacctgcaacgttgcccacccggccagcagcaccaaggtggacaagaaaattgtgcccagggattgtggtgagctcaaaaccccacttggtgacacaactcacacatgcccacggtgcccagagcccaaatcttgtgacacacctcccccgtgcccacggtgcccagagcccaaatcttgtgacacaactcacacatgcccacggtgcccagagcccaaatcttgtgacacacctcccccgtgcccaaggtgcccagcacctgaactcagaaagaggcgagagggcagaggaagtcttctaacatgcggtgacgtggaggagaatcccggccctatgatgagtcctgcccagttcctgtttctgttagtgctctggattcgggaaaccaacggtgatgttgtgatgacccagactccactcactttgtcggttaccattggacaaccagcctccatctcttgcaagtcaagtcagagcctcttagatagtgatggaaagacatatttgaattggttgttacagaggccaggccagtctccaaagcgcctaatctatctggtgtctaaactggactctggagtccctgacagattcactggcagtggatcagggacagatttcacactgaaaattagcagagtggaggctgaggatttgggagtttattattgctggcaaggtacacattttcctcggacgttcggtggaggcaccaagctggaaatcaaacgggctgatgctgcaccaactgtatccatcttcccaccatccagtgagcagttaacatctggaggtgcctcagtcgtgtgcttcttgaacaacttctaccccaaagacatcaatgtcaagtggaagattgatggcagtgaacgacaaaatggcgtcctgaacagttggactgatcaggacagcaaagacagcacctacagcatgagcagcaccctcacgttgaccaaggacgagtatgaacgacataacagctatacctgtgaggccactcacaagacatcaacttcacccattgtcaagagcttcaacaggaatgagtgttagtaactcgaggacggggtgaactacgcctgaggatccgatctttttccctctgccaaaaattatggggacatcatgaagccccttgagcatctgacttctggctaataaaggaaatttattttcattgcaatagtgtgttggaattttttgtgtctctcactcggcctaggtagataagtagcatggcgggttaatcattaactacaaggaacccctagtgatggagttggccactccctctctgcgcgctcgctcgctcactgaggccgggcgaccaaaggtcgcccgacgcccgggctttgcccgggcggcctcagtgagcgagcgagcgcgcag

SEQ ID NO: 4552 - DNA, 3324 bp, Artificial Sequence
  Description of Artificial Sequence: Synthetic polynucleotide
ctgcgcgctcgctcgctcactgaggccgcccgggcaaagcccgggcgtcgggcgacctttggtcgcccggcctcagtgagcgagcgagcgcgcagagagggagtggccaactccatcactaggggttccttgtagttaatgattaacccgccatgctacttatctaccagggtaatggggatcctctagaactatagctagtcgacattgattattgactagttattaatagtaatcaattacggggtcattagttcatagcccatatatggagttccgcgttacataacttacggtaaatggcccgcctggctgaccgcccaacgacccccgcccattgacgtcaataatgacgtatgttcccatagtaacgccaatagggactttccattgacgtcaatgggtggagtatttacggtaaactgcccacttggcagtacatcaagtgtatcatatgccaagtacgccccctattgacgtcaatgacggtaaatggcccgcctggcattatgcccagtacatgaccttatgggactttcctacttggcagtacatctacgtattagtcatcgctattaccatgtcgaggccacgttctgcttcactctccccatctcccccccctccccacccccaattttgtatttatttattttttaattattttgtgcagcgatgggggcggggggggggggcgcgcgccaggcggggcggggcggggcgaggggcggggcggggcgaggcggagaggtgcggcggcagccaatcagagcggcgcgctccgaaagtttccttttatggcgaggcggcggcggcggcggccctataaaaagcgaagcgcgcggcgggcgggagcaagcttcgtttagtgaaccgtcagatcgcctggagacgccatccacgctgttttgacctccatagaagacaccgggaccgatccagcctccgcggattcgaatcccggccgggaacggtgcattggaacgcggattccccgtgccaagagtgacgtaagtaccgcctatagagtctataggcccacaaaaaatgctttcttcttttaatatacttttttgtttatcttatttctaatactttccctaatctctttctttcagggcaataatgatacaatgtatcatgcctctttgcaccattctaaagaataacagtgataatttctgggttaaggcaatagcaatatttctgcatataaatatttctgcatataaattgtaactgatgtaagaggtttcatattgctaatagcagctacaatccagctaccattctgcttttattttatggttgggataaggctggattattctgagtccaagctaggcccttttgctaatcatgttcatacctcttatcttcctcccacagctcctgggcaacgtgctggtctgtgtgctggcccatcactttggcaaagaattgagctccttcctactcaaagccacatgaataggaggagccaccatgggatggagctggatctttctctttctcctgtcaggaactacaggtgtcctctctgaggtccagctgcaacagtctggacctgagctggtgaagcctggggcttcagtgaagatatcctgcaagacttctggatacacattcactgaatacaccatacactgggtgaagcagagccatggagagagccttgagtggattggaggtattaatccaaacgatggtggtactatttacaaccagaagttcaagggcaaggccacattgactgtagacaagtcctccaaaacagcctacatggagctccgcagcctgacatctgaggattctgcagtcttttactgtgcaagagggccctccgccaggtttccttactggggccaagggactctggtcactgtctctgcagccaaaacgacacccccatctgtctatccactggcccctggatctgctgcccaaactaactccatggtgaccctgggatgcctggtcaagggctatttccctgagccagtgacagtgacctggaactctggatccctgtccagcggtgtgcacaccttcccagctgtcctgcagtctgacctctacactctgagcagctcagtgactgtcccctccagcacctggcccagcgagaccgtcacctgcaacgttgcccacccggccagcagcaccaaggtggacaagaaaattgtgcccagggattgtggtagaaagaggcgagagggcagaggaagtcttctaacatgcggtgacgtggaggagaatcccggccctatgatgagtcctgcccagttcctgtttctgttagtgctctggattcgggaaaccaacggtgatgttgtgatgacccagactccactcactttgtcggttaccattggacaaccagcctccatctcttgcaagtcaagtcagagcctcttagatagtgatggaaagacatatttgaattggttgttacagaggccaggccagtctccaaagcgcctaatctatctggtgtctaaactggactctggagtccctgacagattcactggcagtggatcagggacagatttcacactgaaaattagcagagtggaggctgaggatttgggagtttattattgctggcaaggtacacattttcctcggacgttcggtggaggcaccaagctggaaatcaaacgggctgatgctgcaccaactgtatccatcttcccaccatccagtgagcagttaacatctggaggtgcctcagtcgtgtgcttcttgaacaacttctaccccaaagacatcaatgtcaagtggaagattgatggcagtgaacgacaaaatggcgtcctgaacagttggactgatcaggacagcaaagacagcacctacagcatgagcagcaccctcacgttgaccaaggacgagtatgaacgacataacagctatacctgtgaggccactcacaagacatcaacttcacccattgtcaagagcttcaacaggaatgagtgttagtaactcgaggacggggtgaactacgcctgaggatccgatctttttccctctgccaaaaattatggggacatcatgaagccccttgagcatctgacttctggctaataaaggaaatttattttcattgcaatagtgtgttggaattttttgtgtctctcactcggcctaggtagataagtagcatggcgggttaatcattaactacaaggaacccctagtgatggagttggccactccctctctgcgcgctcgctcgctcactgaggccgggcgaccaaaggtcgcccgacgcccgggctttgcccgggcggcctcagtgagcgagcgagcgcgcag

SEQ ID NO: 4553 - DNA, 2627 bp, Artificial Sequence
  Description of Artificial Sequence: Synthetic polynucleotide
ctgcgcgctcgctcgctcactgaggccgcccgggcaaagcccgggcgtcgggcgacctttggtcgcccggcctcagtgagcgagcgagcgcgcagagagggagtggccaactccatcactaggggttccttgtagttaatgattaacccgccatgctacttatctaccagggtaatggggatcctctagaactatagctagtcgacattgattattgactagttattaatagtaatcaattacggggtcattagttcatagcccatatatggagttccgcgttacataacttacggtaaatggcccgcctggctgaccgcccaacgacccccgcccattgacgtcaataatgacgtatgttcccatagtaacgccaatagggactttccattgacgtcaatgggtggagtatttacggtaaactgcccacttggcagtacatcaagtgtatcatatgccaagtacgccccctattgacgtcaatgacggtaaatggcccgcctggcattatgcccagtacatgaccttatgggactttcctacttggcagtacatctacgtattagtcatcgctattaccatgtcgaggccacgttctgcttcactctccccatctcccccccctccccacccccaattttgtatttatttattttttaattattttgtgcagcgatgggggcggggggggggggcgcgcgccaggcggggcggggcggggcgaggggcggggcggggcgaggcggagaggtgcggcggcagccaatcagagcggcgcgctccgaaagtttccttttatggcgaggcggcggcggcggcggccctataaaaagcgaagcgcgcggcgggcgggagcaagcttcgtttagtgaaccgtcagatcgcctggagacgccatccacgctgttttgacctccatagaagacaccgggaccgatccagcctccgcggattcgaatcccggccgggaacggtgcattggaacgcggattccccgtgccaagagtgacgtaagtaccgcctatagagtctataggcccacaaaaaatgctttcttcttttaatatacttttttgtttatcttatttctaatactttccctaatctctttctttcagggcaataatgatacaatgtatcatgcctctttgcaccattctaaagaataacagtgataatttctgggttaaggcaatagcaatatttctgcatataaatatttctgcatataaattgtaactgatgtaagaggtttcatattgctaatagcagctacaatccagctaccattctgcttttattttatggttgggataaggctggattattctgagtccaagctaggcccttttgctaatcatgttcatacctcttatcttcctcccacagctcctgggcaacgtgctggtctgtgtgctggcccatcactttggcaaagaattgagctccttcctactcaaagccacatgaataggaggagccaccatgagtcctgcccagttcctgtttctgttagtgctctggattcgggaaaccaacggtgatgttgtgatgacccagactccactcactttgtcggttaccattggacaaccagcctccatctcttgcaagtcaagtcagagcctcttagatagtgatggaaagacatatttgaattggttgttacagaggccaggccagtctccaaagcgcctaatctatctggtgtctaaactggactctggagtccctgacagattcactggcagtggatcagggacagatttcacactgaaaattagcagagtggaggctgaggatttgggagtttattattgctggcaaggtacacattttcctcggacgttcggtggaggcaccaagctggaaatcaaacggggtggtggtggtagcggcggcggcggctctggtggtggtggatccgaggtccagctgcaacagtctggacctgagctggtgaagcctggggcttcagtgaagatatcctgcaagacttctggatacacattcactgaatacaccatacactgggtgaagcagagccatggagagagccttgagtggattggaggtattaatccaaacgatggtggtactatttacaaccagaagttcaagggcaaggccacattgactgtagacaagtcctccaaaacagcctacatggagctccgcagcctgacatctgaggattctgcagtcttttactgtgcaagagggccctccgccaggtttccttactggggccaagggactctggtcactgtctctgcatacccatacgatgttccagattacgcttagtaactcgagcctgaggatccgatctttttccctctgccaaaaattatggggacatcatgaagccccttgagcatctgacttctggctaataaaggaaatttattttcattgcaatagtgtgttggaattttttgtgtctctcactcggcctaggtagataagtagcatggcgggttaatcattaactacaaggaacccctagtgatggagttggccactccctctctgcgcgctcgctcgctcactgaggccgggcgaccaaaggtcgcccgacgcccgggctttgcccgggcggcctcagtgagcgagcgagcgcgcag

SEQ ID NO: 4554 - DNA, 2621 bp, Artificial Sequence
  Description of Artificial Sequence: Synthetic polynucleotide
ctgcgcgctcgctcgctcactgaggccgcccgggcaaagcccgggcgtcgggcgacctttggtcgcccggcctcagtgagcgagcgagcgcgcagagagggagtggccaactccatcactaggggttccttgtagttaatgattaacccgccatgctacttatctaccagggtaatggggatcctctagaactatagctagtcgacattgattattgactagttattaatagtaatcaattacggggtcattagttcatagcccatatatggagttccgcgttacataacttacggtaaatggcccgcctggctgaccgcccaacgacccccgcccattgacgtcaataatgacgtatgttcccatagtaacgccaatagggactttccattgacgtcaatgggtggagtatttacggtaaactgcccacttggcagtacatcaagtgtatcatatgccaagtacgccccctattgacgtcaatgacggtaaatggcccgcctggcattatgcccagtacatgaccttatgggactttcctacttggcagtacatctacgtattagtcatcgctattaccatgtcgaggccacgttctgcttcactctccccatctcccccccctccccacccccaattttgtatttatttattttttaattattttgtgcagcgatgggggcggggggggggggcgcgcgccaggcggggcggggcggggcgaggggcggggcggggcgaggcggagaggtgcggcggcagccaatcagagcggcgcgctccgaaagtttccttttatggcgaggcggcggcggcggcggccctataaaaagcgaagcgcgcggcgggcgggagcaagcttcgtttagtgaaccgtcagatcgcctggagacgccatccacgctgttttgacctccatagaagacaccgggaccgatccagcctccgcggattcgaatcccggccgggaacggtgcattggaacgcggattccccgtgccaagagtgacgtaagtaccgcctatagagtctataggcccacaaaaaatgctttcttcttttaatatacttttttgtttatcttatttctaatactttccctaatctctttctttcagggcaataatgatacaatgtatcatgcctctttgcaccattctaaagaataacagtgataatttctgggttaaggcaatagcaatatttctgcatataaatatttctgcatataaattgtaactgatgtaagaggtttcatattgctaatagcagctacaatccagctaccattctgcttttattttatggttgggataaggctggattattctgagtccaagctaggcccttttgctaatcatgttcatacctcttatcttcctcccacagctcctgggcaacgtgctggtctgtgtgctggcccatcactttggcaaagaattgagctccttcctactcaaagccacatgaataggaggagccaccatgggatggagctggatctttctctttctcctgtcaggaactacaggtgtcctctctgaggtccagctgcaacagtctggacctgagctggtgaagcctggggcttcagtgaagatatcctgcaagacttctggatacacattcactgaatacaccatacactgggtgaagcagagccatggagagagccttgagtggattggaggtattaatccaaacgatggtggtactatttacaaccagaagttcaagggcaaggccacattgactgtagacaagtcctccaaaacagcctacatggagctccgcagcctgacatctgaggattctgcagtcttttactgtgcaagagggccctccgccaggtttccttactggggccaagggactctggtcactgtctctgcaggtggtggtggtagcggcggcggcggctctggtggtggtggatccgatgttgtgatgacccagactccactcactttgtcggttaccattggacaaccagcctccatctcttgcaagtcaagtcagagcctcttagatagtgatggaaagacatatttgaattggttgttacagaggccaggccagtctccaaagcgcctaatctatctggtgtctaaactggactctggagtccctgacagattcactggcagtggatcagggacagatttcacactgaaaattagcagagtggaggctgaggatttgggagtttattattgctggcaaggtacacattttcctcggacgttcggtggaggcaccaagctggaaatcaaacggtacccatacgatgttccagattacgcttagtgacctgaggatccgatctttttccctctgccaaaaattatggggacatcatgaagccccttgagcatctgacttctggctaataaaggaaatttattttcattgcaatagtgtgttggaattttttgtgtctctcactcggcctaggtagataagtagcatggcgggttaatcattaactacaaggaacccctagtgatggagttggccactccctctctgcgcgctcgctcgctcactgaggccgggcgaccaaaggtcgcccgacgcccgggctttgcccgggcggcctcagtgagcgagcgagcgcgcag

SEQ ID NO: 4555 - DNA, 3580 bp, Artificial Sequence
  Description of Artificial Sequence: Synthetic polynucleotide
ctgcgcgctcgctcgctcactgaggccgcccgggcaaagcccgggcgtcgggcgacctttggtcgcccggcctcagtgagcgagcgagcgcgcagagagggagtggccaactccatcactaggggttccttgtagttaatgattaacccgccatgctacttatctaccagggtaatggggatcctctagaactatagctagtcgacataacgcgtgatctaacatatcctggtgtggagtagcggacgctgctatgacagaggctcgggggcctgagctggctctgtgagctggggaggaggcagacagccaggccttgtctgcaagcagacctggcagcattgggctggccgccccccagggcctcctcttcatgcccagtgaatgactcaccttggcacagacacaatgttcggggtgggcacagtgcctgcttcccgccgcaccccagcccccctcaaatgccttccgagaagcccattgagcagggggcttgcattgcaccccagcctgacagcctggcatcttgggataaaagcagcacagccccctaggggctgcccttgctgtgtggcgccaccggcggtggagaacaaggctctattcagcctgtgcccaggaaaggggatcaggggatgcccaggcatggacagtgggtggcagggggggagaggagggctgtctgcttcccagaagtccaaggacacaaatgggtgaggggagagctctccccatagctgggctgcggcccaaccccaccccctcaggctatgccagggggtgttgccaggggcacccgggcatcgccagtctagcccactccttcataaagccctcgcatcccaggagcgagcagagccagagcaggttggagaggagacgcatcacctccgctgctcgcggggatcctctagaagcttcgtttagtgaaccgtcagatcgcctggagacgccatccacgctgttttgacctccatagaagacaccgggaccgatccagcctccgcggattcgaatcccggccgggaacggtgcattggaacgcggattccccgtgccaagagtgacgtaagtaccgcctatagagtctataggcccacaaaaaatgctttcttcttttaatatacttttttgtttatcttatttctaatactttccctaatctctttctttcagggcaataatgatacaatgtatcatgcctctttgcaccattctaaagaataacagtgataatttctgggttaaggcaatagcaatatttctgcatataaatatttctgcatataaattgtaactgatgtaagaggtttcatattgctaatagcagctacaatccagctaccattctgcttttattttatggttgggataaggctggattattctgagtccaagctaggcccttttgctaatcatgttcatacctcttatcttcctcccacagctcctgggcaacgtgctggtctgtgtgctggcccatcactttggcaaagaattgagctccttcctactcaaagccacatgaataggaggagccaccatgggatggagctggatctttctctttctcctgtcaggaactacaggtgtcctctctgaggtccagctgcaacagtctggacctgagctggtgaagcctggggcttcagtgaagatatcctgcaagacttctggatacacattcactgaatacaccatacactgggtgaagcagagccatggagagagccttgagtggattggaggtattaatccaaacgatggtggtactatttacaaccagaagttcaagggcaaggccacattgactgtagacaagtcctccaaaacagcctacatggagctccgcagcctgacatctgaggattctgcagtcttttactgtgcaagagggccctccgccaggtttccttactggggccaagggactctggtcactgtctctgcagccaaaacgacacccccatctgtctatccactggcccctggatctgctgcccaaactaactccatggtgaccctgggatgcctggtcaagggctatttccctgagccagtgacagtgacctggaactctggatccctgtccagcggtgtgcacaccttcccagctgtcctgcagtctgacctctacactctgagcagctcagtgactgtcccctccagcacctggcccagcgagaccgtcacctgcaacgttgcccacccggccagcagcaccaaggtggacaagaaaattgtgcccagggattgtggtgagctcaaaaccccacttggtgacacaactcacacatgcccacggtgcccagagcccaaatcttgtgacacacctcccccgtgcccacggtgcccagagcccaaatcttgtgacacaactcacacatgcccacggtgcccagagcccaaatcttgtgacacacctcccccgtgcccaaggtgcccagcacctgaactcagaaagaggcgagagggcagaggaagtcttctaacatgcggtgacgtggaggagaatcccggccctatgatgagtcctgcccagttcctgtttctgttagtgctctggattcgggaaaccaacggtgatgttgtgatgacccagactccactcactttgtcggttaccattggacaaccagcctccatctcttgcaagtcaagtcagagcctcttagatagtgatggaaagacatatttgaattggttgttacagaggccaggccagtctccaaagcgcctaatctatctggtgtctaaactggactctggagtccctgacagattcactggcagtggatcagggacagatttcacactgaaaattagcagagtggaggctgaggatttgggagtttattattgctggcaaggtacacattttcctcggacgttcggtggaggcaccaagctggaaatcaaacgggctgatgctgcaccaactgtatccatcttcccaccatccagtgagcagttaacatctggaggtgcctcagtcgtgtgcttcttgaacaacttctaccccaaagacatcaatgtcaagtggaagattgatggcagtgaacgacaaaatggcgtcctgaacagttggactgatcaggacagcaaagacagcacctacagcatgagcagcaccctcacgttgaccaaggacgagtatgaacgacataacagctatacctgtgaggccactcacaagacatcaacttcacccattgtcaagagcttcaacaggaatgagtgttagtaactcgaggacggggtgaactacgcctgaggatccgatctttttccctctgccaaaaattatggggacatcatgaagccccttgagcatctgacttctggctaataaaggaaatttattttcattgcaatagtgtgttggaattttttgtgtctctcactcggcctaggtagataagtagcatggcgggttaatcattaactacaaggaacccctagtgatggagttggccactccctctctgcgcgctcgctcgctcactgaggccgggcgaccaaaggtcgcccgacgcccgggctttgcccgggcggcctcagtgagcgagcgagcgcgcag

SEQ ID NO: 4556 - DNA, 3382 bp, Artificial Sequence
  Description of Artificial Sequence: Synthetic polynucleotide
ctgcgcgctcgctcgctcactgaggccgcccgggcaaagcccgggcgtcgggcgacctttggtcgcccggcctcagtgagcgagcgagcgcgcagagagggagtggccaactccatcactaggggttccttgtagttaatgattaacccgccatgctacttatctaccagggtaatggggatcctctagaactatagctagtcgacataacgcgtgatctaacatatcctggtgtggagtagcggacgctgctatgacagaggctcgggggcctgagctggctctgtgagctggggaggaggcagacagccaggccttgtctgcaagcagacctggcagcattgggctggccgccccccagggcctcctcttcatgcccagtgaatgactcaccttggcacagacacaatgttcggggtgggcacagtgcctgcttcccgccgcaccccagcccccctcaaatgccttccgagaagcccattgagcagggggcttgcattgcaccccagcctgacagcctggcatcttgggataaaagcagcacagccccctaggggctgcccttgctgtgtggcgccaccggcggtggagaacaaggctctattcagcctgtgcccaggaaaggggatcaggggatgcccaggcatggacagtgggtggcagggggggagaggagggctgtctgcttcccagaagtccaaggacacaaatgggtgaggggagagctctccccatagctgggctgcggcccaaccccaccccctcaggctatgccagggggtgttgccaggggcacccgggcatcgccagtctagcccactccttcataaagccctcgcatcccaggagcgagcagagccagagcaggttggagaggagacgcatcacctccgctgctcgcggggatcctctagaagcttcgtttagtgaaccgtcagatcgcctggagacgccatccacgctgttttgacctccatagaagacaccgggaccgatccagcctccgcggattcgaatcccggccgggaacggtgcattggaacgcggattccccgtgccaagagtgacgtaagtaccgcctatagagtctataggcccacaaaaaatgctttcttcttttaatatacttttttgtttatcttatttctaatactttccctaatctctttctttcagggcaataatgatacaatgtatcatgcctctttgcaccattctaaagaataacagtgataatttctgggttaaggcaatagcaatatttctgcatataaatatttctgcatataaattgtaactgatgtaagaggtttcatattgctaatagcagctacaatccagctaccattctgcttttattttatggttgggataaggctggattattctgagtccaagctaggcccttttgctaatcatgttcatacctcttatcttcctcccacagctcctgggcaacgtgctggtctgtgtgctggcccatcactttggcaaagaattgagctccttcctactcaaagccacatgaataggaggagccaccatgggatggagctggatctttctctttctcctgtcaggaactacaggtgtcctctctgaggtccagctgcaacagtctggacctgagctggtgaagcctggggcttcagtgaagatatcctgcaagacttctggatacacattcactgaatacaccatacactgggtgaagcagagccatggagagagccttgagtggattggaggtattaatccaaacgatggtggtactatttacaaccagaagttcaagggcaaggccacattgactgtagacaagtcctccaaaacagcctacatggagctccgcagcctgacatctgaggattctgcagtcttttactgtgcaagagggccctccgccaggtttccttactggggccaagggactctggtcactgtctctgcagccaaaacgacacccccatctgtctatccactggcccctggatctgctgcccaaactaactccatggtgaccctgggatgcctggtcaagggctatttccctgagccagtgacagtgacctggaactctggatccctgtccagcggtgtgcacaccttcccagctgtcctgcagtctgacctctacactctgagcagctcagtgactgtcccctccagcacctggcccagcgagaccgtcacctgcaacgttgcccacccggccagcagcaccaaggtggacaagaaaattgtgcccagggattgtggtagaaagaggcgagagggcagaggaagtcttctaacatgcggtgacgtggaggagaatcccggccctatgatgagtcctgcccagttcctgtttctgttagtgctctggattcgggaaaccaacggtgatgttgtgatgacccagactccactcactttgtcggttaccattggacaaccagcctccatctcttgcaagtcaagtcagagcctcttagatagtgatggaaagacatatttgaattggttgttacagaggccaggccagtctccaaagcgcctaatctatctggtgtctaaactggactctggagtccctgacagattcactggcagtggatcagggacagatttcacactgaaaattagcagagtggaggctgaggatttgggagtttattattgctggcaaggtacacattttcctcggacgttcggtggaggcaccaagctggaaatcaaacgggctgatgctgcaccaactgtatccatcttcccaccatccagtgagcagttaacatctggaggtgcctcagtcgtgtgcttcttgaacaacttctaccccaaagacatcaatgtcaagtggaagattgatggcagtgaacgacaaaatggcgtcctgaacagttggactgatcaggacagcaaagacagcacctacagcatgagcagcaccctcacgttgaccaaggacgagtatgaacgacataacagctatacctgtgaggccactcacaagacatcaacttcacccattgtcaagagcttcaacaggaatgagtgttagtaactcgaggacggggtgaactacgcctgaggatccgatctttttccctctgccaaaaattatggggacatcatgaagccccttgagcatctgacttctggctaataaaggaaatttattttcattgcaatagtgtgttggaattttttgtgtctctcactcggcctaggtagataagtagcatggcgggttaatcattaactacaaggaacccctagtgatggagttggccactccctctctgcgcgctcgctcgctcactgaggccgggcgaccaaaggtcgcccgacgcccgggctttgcccgggcggcctcagtgagcgagcgagcgcgcag

SEQ ID NO: 4557 - DNA, 2685 bp, Artificial Sequence
  Description of Artificial Sequence: Synthetic polynucleotide
ctgcgcgctcgctcgctcactgaggccgcccgggcaaagcccgggcgtcgggcgacctttggtcgcccggcctcagtgagcgagcgagcgcgcagagagggagtggccaactccatcactaggggttccttgtagttaatgattaacccgccatgctacttatctaccagggtaatggggatcctctagaactatagctagtcgacataacgcgtgatctaacatatcctggtgtggagtagcggacgctgctatgacagaggctcgggggcctgagctggctctgtgagctggggaggaggcagacagccaggccttgtctgcaagcagacctggcagcattgggctggccgccccccagggcctcctcttcatgcccagtgaatgactcaccttggcacagacacaatgttcggggtgggcacagtgcctgcttcccgccgcaccccagcccccctcaaatgccttccgagaagcccattgagcagggggcttgcattgcaccccagcctgacagcctggcatcttgggataaaagcagcacagccccctaggggctgcccttgctgtgtggcgccaccggcggtggagaacaaggctctattcagcctgtgcccaggaaaggggatcaggggatgcccaggcatggacagtgggtggcagggggggagaggagggctgtctgcttcccagaagtccaaggacacaaatgggtgaggggagagctctccccatagctgggctgcggcccaaccccaccccctcaggctatgccagggggtgttgccaggggcacccgggcatcgccagtctagcccactccttcataaagccctcgcatcccaggagcgagcagagccagagcaggttggagaggagacgcatcacctccgctgctcgcggggatcctctagaagcttcgtttagtgaaccgtcagatcgcctggagacgccatccacgctgttttgacctccatagaagacaccgggaccgatccagcctccgcggattcgaatcccggccgggaacggtgcattggaacgcggattccccgtgccaagagtgacgtaagtaccgcctatagagtctataggcccacaaaaaatgctttcttcttttaatatacttttttgtttatcttatttctaatactttccctaatctctttctttcagggcaataatgatacaatgtatcatgcctctttgcaccattctaaagaataacagtgataatttctgggttaaggcaatagcaatatttctgcatataaatatttctgcatataaattgtaactgatgtaagaggtttcatattgctaatagcagctacaatccagctaccattctgcttttattttatggttgggataaggctggattattctgagtccaagctaggcccttttgctaatcatgttcatacctcttatcttcctcccacagctcctgggcaacgtgctggtctgtgtgctggcccatcactttggcaaagaattgagctccttcctactcaaagccacatgaataggaggagccaccatgagtcctgcccagttcctgtttctgttagtgctctggattcgggaaaccaacggtgatgttgtgatgacccagactccactcactttgtcggttaccattggacaaccagcctccatctcttgcaagtcaagtcagagcctcttagatagtgatggaaagacatatttgaattggttgttacagaggccaggccagtctccaaagcgcctaatctatctggtgtctaaactggactctggagtccctgacagattcactggcagtggatcagggacagatttcacactgaaaattagcagagtggaggctgaggatttgggagtttattattgctggcaaggtacacattttcctcggacgttcggtggaggcaccaagctggaaatcaaacggggtggtggtggtagcggcggcggcggctctggtggtggtggatccgaggtccagctgcaacagtctggacctgagctggtgaagcctggggcttcagtgaagatatcctgcaagacttctggatacacattcactgaatacaccatacactgggtgaagcagagccatggagagagccttgagtggattggaggtattaatccaaacgatggtggtactatttacaaccagaagttcaagggcaaggccacattgactgtagacaagtcctccaaaacagcctacatggagctccgcagcctgacatctgaggattctgcagtcttttactgtgcaagagggccctccgccaggtttccttactggggccaagggactctggtcactgtctctgcatacccatacgatgttccagattacgcttagtaactcgagcctgaggatccgatctttttccctctgccaaaaattatggggacatcatgaagccccttgagcatctgacttctggctaataaaggaaatttattttcattgcaatagtgtgttggaattttttgtgtctctcactcggcctaggtagataagtagcatggcgggttaatcattaactacaaggaacccctagtgatggagttggccactccctctctgcgcgctcgctcgctcactgaggccgggcgaccaaaggtcgcccgacgcccgggctttgcccgggcggcctcagtgagcgagcgagcgcgcag

SEQ ID NO: 4558 - DNA, 2705 bp, Artificial Sequence
  Description of Artificial Sequence: Synthetic polynucleotide
ctgcgcgctcgctcgctcactgaggccgcccgggcaaagcccgggcgtcgggcgacctttggtcgcccggcctcagtgagcgagcgagcgcgcagagagggagtggccaactccatcactaggggttccttgtagttaatgattaacccgccatgctacttatctaccagggtaatggggatcctctagaactatagctagtcgacataacgcgtgatctaacatatcctggtgtggagtagcggacgctgctatgacagaggctcgggggcctgagctggctctgtgagctggggaggaggcagacagccaggccttgtctgcaagcagacctggcagcattgggctggccgccccccagggcctcctcttcatgcccagtgaatgactcaccttggcacagacacaatgttcggggtgggcacagtgcctgcttcccgccgcaccccagcccccctcaaatgccttccgagaagcccattgagcagggggcttgcattgcaccccagcctgacagcctggcatcttgggataaaagcagcacagccccctaggggctgcccttgctgtgtggcgccaccggcggtggagaacaaggctctattcagcctgtgcccaggaaaggggatcaggggatgcccaggcatggacagtgggtggcagggggggagaggagggctgtctgcttcccagaagtccaaggacacaaatgggtgaggggagagctctccccatagctgggctgcggcccaaccccaccccctcaggctatgccagggggtgttgccaggggcacccgggcatcgccagtctagcccactccttcataaagccctcgcatcccaggagcgagcagagccagagcaggttggagaggagacgcatcacctccgctgctcgcggggatcctctagaagcttcgtttagtgaaccgtcagatcgcctggagacgccatccacgctgttttgacctccatagaagacaccgggaccgatccagcctccgcggattcgaatcccggccgggaacggtgcattggaacgcggattccccgtgccaagagtgacgtaagtaccgcctatagagtctataggcccacaaaaaatgctttcttcttttaatatacttttttgtttatcttatttctaatactttccctaatctctttctttcagggcaataatgatacaatgtatcatgcctctttgcaccattctaaagaataacagtgataatttctgggttaaggcaatagcaatatttctgcatataaatatttctgcatataaattgtaactgatgtaagaggtttcatattgctaatagcagctacaatccagctaccattctgcttttattttatggttgggataaggctggattattctgagtccaagctaggcccttttgctaatcatgttcatacctcttatcttcctcccacagctcctgggcaacgtgctggtctgtgtgctggcccatcactttggcaaagaattgagctccttcctactcaaagccacatgaataggaggagccaccatgggatggagctggatctttctctttctcctgtcaggaactacaggtgtcctctctgaggtccagctgcaacagtctggacctgagctggtgaagcctggggcttcagtgaagatatcctgcaagacttctggatacacattcactgaatacaccatacactgggtgaagcagagccatggagagagccttgagtggattggaggtattaatccaaacgatggtggtactatttacaaccagaagttcaagggcaaggccacattgactgtagacaagtcctccaaaacagcctacatggagctccgcagcctgacatctgaggattctgcagtcttttactgtgcaagagggccctccgccaggtttccttactggggccaagggactctggtcactgtctctgcaggtggtggtggtagcggcggcggcggctctggtggtggtggatccgatgttgtgatgacccagactccactcactttgtcggttaccattggacaaccagcctccatctcttgcaagtcaagtcagagcctcttagatagtgatggaaagacatatttgaattggttgttacagaggccaggccagtctccaaagcgcctaatctatctggtgtctaaactggactctggagtccctgacagattcactggcagtggatcagggacagatttcacactgaaaattagcagagtggaggctgaggatttgggagtttattattgctggcaaggtacacattttcctcggacgttcggtggaggcaccaagctggaaatcaaacggtacccatacgatgttccagattacgcttagtgacctgatcgaggacggggtgaactacgcctgaggatccgatctttttccctctgccaaaaattatggggacatcatgaagccccttgagcatctgacttctggctaataaaggaaatttattttcattgcaatagtgtgttggaattttttgtgtctctcactcggcctaggtagataagtagcatggcgggttaatcattaactacaaggaacccctagtgatggagttggccactccctctctgcgcgctcgctcgctcactgaggccgggcgaccaaaggtcgcccgacgcccgggctttgcccgggcggcctcagtgagcgagcgagcgcgcag

SEQ ID NO: 4559 - DNA, 3438 bp, Artificial Sequence
  Description of Artificial Sequence: Synthetic polynucleotide
ctgcgcgctcgctcgctcactgaggccgcccgggcaaagcccgggcgtcgggcgacctttggtcgcccggcctcagtgagcgagcgagcgcgcagagagggagtggccaactccatcactaggggttccttgtagttaatgattaacccgccatgctacttatctaccagggtaatggggatcctctagaactatagctagtcgacataacgcgttagtatctgcagagggccctgcgtatgagtgcaagtgggttttaggaccaggatgaggcggggtgggggtgcctacctgacgaccgaccccgacccactggacaagcacccaacccccattccccaaattgcgcatcccctatcagagagggggaggggaaacaggatgcggcgaggcgcgtgcgcactgccagcttcagcaccgcggacagtgccttcgcccccgcctggcggcgcgcgccaccgccgcctcagcactgaaggcgcgctgacgtcactcgccggtcccccgcaaactccccttcccggccaccttggtcgcgtccgcgccgccgccggcccagccggaccgcaccacgcgaggcgcgagataggggggcacgggcgcgaccatctgcgctgcggcgccggcgactcagcgctgcctcagtctgcggtgggcagcggaggagtcgtgtcgtgcctgagagcgcagctgtgctcctgggcaccgcgcagtccgcccccgcggctcctggccagaccacccctaggaccccctgccccaagtcgcagccaagcttcgtttagtgaaccgtcagatcgcctggagacgccatccacgctgttttgacctccatagaagacaccgggaccgatccagcctccgcggattcgaatcccggccgggaacggtgcattggaacgcggattccccgtgccaagagtgacgtaagtaccgcctatagagtctataggcccacaaaaaatgctttcttcttttaatatacttttttgtttatcttatttctaatactttccctaatctctttctttcagggcaataatgatacaatgtatcatgcctctttgcaccattctaaagaataacagtgataatttctgggttaaggcaatagcaatatttctgcatataaatatttctgcatataaattgtaactgatgtaagaggtttcatattgctaatagcagctacaatccagctaccattctgcttttattttatggttgggataaggctggattattctgagtccaagctaggcccttttgctaatcatgttcatacctcttatcttcctcccacagctcctgggcaacgtgctggtctgtgtgctggcccatcactttggcaaagaattgagctccttcctactcaaagccacatgaataggaggagccaccatgggatggagctggatctttctctttctcctgtcaggaactacaggtgtcctctctgaggtccagctgcaacagtctggacctgagctggtgaagcctggggcttcagtgaagatatcctgcaagacttctggatacacattcactgaatacaccatacactgggtgaagcagagccatggagagagccttgagtggattggaggtattaatccaaacgatggtggtactatttacaaccagaagttcaagggcaaggccacattgactgtagacaagtcctccaaaacagcctacatggagctccgcagcctgacatctgaggattctgcagtcttttactgtgcaagagggccctccgccaggtttccttactggggccaagggactctggtcactgtctctgcagccaaaacgacacccccatctgtctatccactggcccctggatctgctgcccaaactaactccatggtgaccctgggatgcctggtcaagggctatttccctgagccagtgacagtgacctggaactctggatccctgtccagcggtgtgcacaccttcccagctgtcctgcagtctgacctctacactctgagcagctcagtgactgtcccctccagcacctggcccagcgagaccgtcacctgcaacgttgcccacccggccagcagcaccaaggtggacaagaaaattgtgcccagggattgtggtgagctcaaaaccccacttggtgacacaactcacacatgcccacggtgcccagagcccaaatcttgtgacacacctcccccgtgcccacggtgcccagagcccaaatcttgtgacacaactcacacatgcccacggtgcccagagcccaaatcttgtgacacacctcccccgtgcccaaggtgcccagcacctgaactcagaaagaggcgagagggcagaggaagtcttctaacatgcggtgacgtggaggagaatcccggccctatgatgagtcctgcccagttcctgtttctgttagtgctctggattcgggaaaccaacggtgatgttgtgatgacccagactccactcactttgtcggttaccattggacaaccagcctccatctcttgcaagtcaagtcagagcctcttagatagtgatggaaagacatatttgaattggttgttacagaggccaggccagtctccaaagcgcctaatctatctggtgtctaaactggactctggagtccctgacagattcactggcagtggatcagggacagatttcacactgaaaattagcagagtggaggctgaggatttgggagtttattattgctggcaaggtacacattttcctcggacgttcggtggaggcaccaagctggaaatcaaacgggctgatgctgcaccaactgtatccatcttcccaccatccagtgagcagttaacatctggaggtgcctcagtcgtgtgcttcttgaacaacttctaccccaaagacatcaatgtcaagtggaagattgatggcagtgaacgacaaaatggcgtcctgaacagttggactgatcaggacagcaaagacagcacctacagcatgagcagcaccctcacgttgaccaaggacgagtatgaacgacataacagctatacctgtgaggccactcacaagacatcaacttcacccattgtcaagagcttcaacaggaatgagtgttagtaactcgaggacggggtgaactacgcctgaggatccgatctttttccctctgccaaaaattatggggacatcatgaagccccttgagcatctgacttctggctaataaaggaaatttattttcattgcaatagtgtgttggaattttttgtgtctctcactcggcctaggtagataagtagcatggcgggttaatcattaactacaaggaacccctagtgatggagttggccactccctctctgcgcgctcgctcgctcactgaggccgggcgaccaaaggtcgcccgacgcccgggctttgcccgggcggcctcagtgagcgagcgagcgcgcag

SEQ ID NO: 4560 - DNA, 3240 bp, Artificial Sequence
  Description of Artificial Sequence: Synthetic polynucleotide
ctgcgcgctcgctcgctcactgaggccgcccgggcaaagcccgggcgtcgggcgacctttggtcgcccggcctcagtgagcgagcgagcgcgcagagagggagtggccaactccatcactaggggttccttgtagttaatgattaacccgccatgctacttatctaccagggtaatggggatcctctagaactatagctagtcgacataacgcgttagtatctgcagagggccctgcgtatgagtgcaagtgggttttaggaccaggatgaggcggggtgggggtgcctacctgacgaccgaccccgacccactggacaagcacccaacccccattccccaaattgcgcatcccctatcagagagggggaggggaaacaggatgcggcgaggcgcgtgcgcactgccagcttcagcaccgcggacagtgccttcgcccccgcctggcggcgcgcgccaccgccgcctcagcactgaaggcgcgctgacgtcactcgccggtcccccgcaaactccccttcccggccaccttggtcgcgtccgcgccgccgccggcccagccggaccgcaccacgcgaggcgcgagataggggggcacgggcgcgaccatctgcgctgcggcgccggcgactcagcgctgcctcagtctgcggtgggcagcggaggagtcgtgtcgtgcctgagagcgcagctgtgctcctgggcaccgcgcagtccgcccccgcggctcctggccagaccacccctaggaccccctgccccaagtcgcagccaagcttcgtttagtgaaccgtcagatcgcctggagacgccatccacgctgttttgacctccatagaagacaccgggaccgatccagcctccgcggattcgaatcccggccgggaacggtgcattggaacgcggattccccgtgccaagagtgacgtaagtaccgcctatagagtctataggcccacaaaaaatgctttcttcttttaatatacttttttgtttatcttatttctaatactttccctaatctctttctttcagggcaataatgatacaatgtatcatgcctctttgcaccattctaaagaataacagtgataatttctgggttaaggcaatagcaatatttctgcatataaatatttctgcatataaattgtaactgatgtaagaggtttcatattgctaatagcagctacaatccagctaccattctgcttttattttatggttgggataaggctggattattctgagtccaagctaggcccttttgctaatcatgttcatacctcttatcttcctcccacagctcctgggcaacgtgctggtctgtgtgctggcccatcactttggcaaagaattgagctccttcctactcaaagccacatgaataggaggagccaccatgggatggagctggatctttctctttctcctgtcaggaactacaggtgtcctctctgaggtccagctgcaacagtctggacctgagctggtgaagcctggggcttcagtgaagatatcctgcaagacttctggatacacattcactgaatacaccatacactgggtgaagcagagccatggagagagccttgagtggattggaggtattaatccaaacgatggtggtactatttacaaccagaagttcaagggcaaggccacattgactgtagacaagtcctccaaaacagcctacatggagctccgcagcctgacatctgaggattctgcagtcttttactgtgcaagagggccctccgccaggtttccttactggggccaagggactctggtcactgtctctgcagccaaaacgacacccccatctgtctatccactggcccctggatctgctgcccaaactaactccatggtgaccctgggatgcctggtcaagggctatttccctgagccagtgacagtgacctggaactctggatccctgtccagcggtgtgcacaccttcccagctgtcctgcagtctgacctctacactctgagcagctcagtgactgtcccctccagcacctggcccagcgagaccgtcacctgcaacgttgcccacccggccagcagcaccaaggtggacaagaaaattgtgcccagggattgtggtagaaagaggcgagagggcagaggaagtcttctaacatgcggtgacgtggaggagaatcccggccctatgatgagtcctgcccagttcctgtttctgttagtgctctggattcgggaaaccaacggtgatgttgtgatgacccagactccactcactttgtcggttaccattggacaaccagcctccatctcttgcaagtcaagtcagagcctcttagatagtgatggaaagacatatttgaattggttgttacagaggccaggccagtctccaaagcgcctaatctatctggtgtctaaactggactctggagtccctgacagattcactggcagtggatcagggacagatttcacactgaaaattagcagagtggaggctgaggatttgggagtttattattgctggcaaggtacacattttcctcggacgttcggtggaggcaccaagctggaaatcaaacgggctgatgctgcaccaactgtatccatcttcccaccatccagtgagcagttaacatctggaggtgcctcagtcgtgtgcttcttgaacaacttctaccccaaagacatcaatgtcaagtggaagattgatggcagtgaacgacaaaatggcgtcctgaacagttggactgatcaggacagcaaagacagcacctacagcatgagcagcaccctcacgttgaccaaggacgagtatgaacgacataacagctatacctgtgaggccactcacaagacatcaacttcacccattgtcaagagcttcaacaggaatgagtgttagtaactcgaggacggggtgaactacgcctgaggatccgatctttttccctctgccaaaaattatggggacatcatgaagccccttgagcatctgacttctggctaataaaggaaatttattttcattgcaatagtgtgttggaattttttgtgtctctcactcggcctaggtagataagtagcatggcgggttaatcattaactacaaggaacccctagtgatggagttggccactccctctctgcgcgctcgctcgctcactgaggccgggcgaccaaaggtcgcccgacgcccgggctttgcccgggcggcctcagtgagcgagcgagcgcgcag

SEQ ID NO: 4561 - DNA, 2543 bp, Artificial Sequence
  Description of Artificial Sequence: Synthetic polynucleotide
ctgcgcgctcgctcgctcactgaggccgcccgggcaaagcccgggcgtcgggcgacctttggtcgcccggcctcagtgagcgagcgagcgcgcagagagggagtggccaactccatcactaggggttccttgtagttaatgattaacccgccatgctacttatctaccagggtaatggggatcctctagaactatagctagtcgacataacgcgttagtatctgcagagggccctgcgtatgagtgcaagtgggttttaggaccaggatgaggcggggtgggggtgcctacctgacgaccgaccccgacccactggacaagcacccaacccccattccccaaattgcgcatcccctatcagagagggggaggggaaacaggatgcggcgaggcgcgtgcgcactgccagcttcagcaccgcggacagtgccttcgcccccgcctggcggcgcgcgccaccgccgcctcagcactgaaggcgcgctgacgtcactcgccggtcccccgcaaactccccttcccggccaccttggtcgcgtccgcgccgccgccggcccagccggaccgcaccacgcgaggcgcgagataggggggcacgggcgcgaccatctgcgctgcggcgccggcgactcagcgctgcctcagtctgcggtgggcagcggaggagtcgtgtcgtgcctgagagcgcagctgtgctcctgggcaccgcgcagtccgcccccgcggctcctggccagaccacccctaggaccccctgccccaagtcgcagccaagcttcgtttagtgaaccgtcagatcgcctggagacgccatccacgctgttttgacctccatagaagacaccgggaccgatccagcctccgcggattcgaatcccggccgggaacggtgcattggaacgcggattccccgtgccaagagtgacgtaagtaccgcctatagagtctataggcccacaaaaaatgctttcttcttttaatatacttttttgtttatcttatttctaatactttccctaatctctttctttcagggcaataatgatacaatgtatcatgcctctttgcaccattctaaagaataacagtgataatttctgggttaaggcaatagcaatatttctgcatataaatatttctgcatataaattgtaactgatgtaagaggtttcatattgctaatagcagctacaatccagctaccattctgcttttattttatggttgggataaggctggattattctgagtccaagctaggcccttttgctaatcatgttcatacctcttatcttcctcccacagctcctgggcaacgtgctggtctgtgtgctggcccatcactttggcaaagaattgagctccttcctactcaaagccacatgaataggaggagccaccatgagtcctgcccagttcctgtttctgttagtgctctggattcgggaaaccaacggtgatgttgtgatgacccagactccactcactttgtcggttaccattggacaaccagcctccatctcttgcaagtcaagtcagagcctcttagatagtgatggaaagacatatttgaattggttgttacagaggccaggccagtctccaaagcgcctaatctatctggtgtctaaactggactctggagtccctgacagattcactggcagtggatcagggacagatttcacactgaaaattagcagagtggaggctgaggatttgggagtttattattgctggcaaggtacacattttcctcggacgttcggtggaggcaccaagctggaaatcaaacggggtggtggtggtagcggcggcggcggctctggtggtggtggatccgaggtccagctgcaacagtctggacctgagctggtgaagcctggggcttcagtgaagatatcctgcaagacttctggatacacattcactgaatacaccatacactgggtgaagcagagccatggagagagccttgagtggattggaggtattaatccaaacgatggtggtactatttacaaccagaagttcaagggcaaggccacattgactgtagacaagtcctccaaaacagcctacatggagctccgcagcctgacatctgaggattctgcagtcttttactgtgcaagagggccctccgccaggtttccttactggggccaagggactctggtcactgtctctgcatacccatacgatgttccagattacgcttagtaactcgagcctgaggatccgatctttttccctctgccaaaaattatggggacatcatgaagccccttgagcatctgacttctggctaataaaggaaatttattttcattgcaatagtgtgttggaattttttgtgtctctcactcggcctaggtagataagtagcatggcgggttaatcattaactacaaggaacccctagtgatggagttggccactccctctctgcgcgctcgctcgctcactgaggccgggcgaccaaaggtcgcccgacgcccgggctttgcccgggcggcctcagtgagcgagcgagcgcgcag

SEQ ID NO: 4562 - DNA, 2537 bp, Artificial Sequence
  Description of Artificial Sequence: Synthetic polynucleotide
ctgcgcgctcgctcgctcactgaggccgcccgggcaaagcccgggcgtcgggcgacctttggtcgcccggcctcagtgagcgagcgagcgcgcagagagggagtggccaactccatcactaggggttccttgtagttaatgattaacccgccatgctacttatctaccagggtaatggggatcctctagaactatagctagtcgacataacgcgttagtatctgcagagggccctgcgtatgagtgcaagtgggttttaggaccaggatgaggcggggtgggggtgcctacctgacgaccgaccccgacccactggacaagcacccaacccccattccccaaattgcgcatcccctatcagagagggggaggggaaacaggatgcggcgaggcgcgtgcgcactgccagcttcagcaccgcggacagtgccttcgcccccgcctggcggcgcgcgccaccgccgcctcagcactgaaggcgcgctgacgtcactcgccggtcccccgcaaactccccttcccggccaccttggtcgcgtccgcgccgccgccggcccagccggaccgcaccacgcgaggcgcgagataggggggcacgggcgcgaccatctgcgctgcggcgccggcgactcagcgctgcctcagtctgcggtgggcagcggaggagtcgtgtcgtgcctgagagcgcagctgtgctcctgggcaccgcgcagtccgcccccgcggctcctggccagaccacccctaggaccccctgccccaagtcgcagccaagcttcgtttagtgaaccgtcagatcgcctggagacgccatccacgctgttttgacctccatagaagacaccgggaccgatccagcctccgcggattcgaatcccggccgggaacggtgcattggaacgcggattccccgtgccaagagtgacgtaagtaccgcctatagagtctataggcccacaaaaaatgctttcttcttttaatatacttttttgtttatcttatttctaatactttccctaatctctttctttcagggcaataatgatacaatgtatcatgcctctttgcaccattctaaagaataacagtgataatttctgggttaaggcaatagcaatatttctgcatataaatatttctgcatataaattgtaactgatgtaagaggtttcatattgctaatagcagctacaatccagctaccattctgcttttattttatggttgggataaggctggattattctgagtccaagctaggcccttttgctaatcatgttcatacctcttatcttcctcccacagctcctgggcaacgtgctggtctgtgtgctggcccatcactttggcaaagaattgagctccttcctactcaaagccacatgaataggaggagccaccatgggatggagctggatctttctctttctcctgtcaggaactacaggtgtcctctctgaggtccagctgcaacagtctggacctgagctggtgaagcctggggcttcagtgaagatatcctgcaagacttctggatacacattcactgaatacaccatacactgggtgaagcagagccatggagagagccttgagtggattggaggtattaatccaaacgatggtggtactatttacaaccagaagttcaagggcaaggccacattgactgtagacaagtcctccaaaacagcctacatggagctccgcagcctgacatctgaggattctgcagtcttttactgtgcaagagggccctccgccaggtttccttactggggccaagggactctggtcactgtctctgcaggtggtggtggtagcggcggcggcggctctggtggtggtggatccgatgttgtgatgacccagactccactcactttgtcggttaccattggacaaccagcctccatctcttgcaagtcaagtcagagcctcttagatagtgatggaaagacatatttgaattggttgttacagaggccaggccagtctccaaagcgcctaatctatctggtgtctaaactggactctggagtccctgacagattcactggcagtggatcagggacagatttcacactgaaaattagcagagtggaggctgaggatttgggagtttattattgctggcaaggtacacattttcctcggacgttcggtggaggcaccaagctggaaatcaaacggtacccatacgatgttccagattacgcttagtgacctgaggatccgatctttttccctctgccaaaaattatggggacatcatgaagccccttgagcatctgacttctggctaataaaggaaatttattttcattgcaatagtgtgttggaattttttgtgtctctcactcggcctaggtagataagtagcatggcgggttaatcattaactacaaggaacccctagtgatggagttggccactccctctctgcgcgctcgctcgctcactgaggccgggcgaccaaaggtcgcccgacgcccgggctttgcccgggcggcctcagtgagcgagcgagcgcgcag

SEQ ID NO: 4563 - DNA, 26 bp, Artificial Sequence
  Description of Artificial Sequence: Synthetic polynucleotide
cttcctactcaaagccacatgaatag

SEQ ID NO: 4564 - DNA, 60 bp, Artificial Sequence
  Description of Artificial Sequence: Synthetic polynucleotide
atgatgagtcctgcccagttcctgtttctgttagtgctctggattcgggaaaccaacggt

SEQ ID NO: 4565 - DNA, 449 bp, Artificial Sequence
  Description of Artificial Sequence: Synthetic polynucleotide
atgatgagtcctgcccagttcctgtttctgttagtgctctggattcgggaaaccaacggtgatgttgtgatgacccagactccactcactttgtcggttaccattggacaaccagcctccatctcttgcaagtcaagtcagagcctcttagatagtgatggaaagacatatttgaattggttgttacagaggccaggccagtctccaaagcgcctaatctatctggtgtctaaactggactctggagtccctgacagattcactggcagtggatcagggacagatttcacactgaaaattagcagagtggaggctgaggatttgggagtttattattgctggcaaggtacacattttcctcggacgttcggtggaggcaccaagctggaaatcaaacgggctgatgctgcaccaactgtatccatcttcccaccatccagtgagcagtt
